(19) United States
(12) Patent Application Publication
(10) Pub. No.: US 2025/0122486 A1
(43) Pub. Date: Apr. 17, 2025

(54) ENGINEERED ADENOSINE KINASE VARIANTS

(71) Applicant: Codexis, Inc., Redwood City, CA (US)

(72) Inventors: Stephanie Marie Forget, Redwood City, CA (US); Marissa Greene MacAvoy, Emerald Hills, CA (US); Simon Ng, San Francisco, CA (US); Nicholas Porter, Redwood City, CA (US); Leann Quertinmont Teadt, Redwood City, CA (US); Jonathan Vroom, South San Francisco, CA (US)

(21) Appl. No.: 18/913,982

(22) Filed: Oct. 11, 2024

Related U.S. Application Data
(60) Provisional application No. 63/661,424, filed on Jun. 18, 2024.
(60) Provisional application No. 63/589,818, filed on Oct. 12, 2023.

(51) Int. Cl. C12N 9/12

(52) U.S. Cl. CPC C12N 9/1205; C12Y 207/0102

(57) ABSTRACT

The present disclosure provides engineered adenosine kinase polypeptides, and recombinant polynucleotides encoding the engineered adenosine kinases. The present disclosure further provides method of using the engineered adenosine kinases.

### CROSS-REFERENCE TO RELATED APPLICATIONS

[0001] The present application claims the benefit of U.S. Prov. Pat. Appln. Ser. No. 63/661,424, filed Jun. 18, 2024, and U.S. Prov. Pat. Appln. Ser. No. 63/589,818, filed Oct. 12, 2023, both of which are incorporated by reference in their entireties, for all purposes.

### REFERENCE TO SEQUENCE LISTING, TABLE OR COMPUTER PROGRAM

[0002] The Sequence Listing concurrently submitted herewith as file name CX10-257WO3_ST26.xml, created on Oct. 9, 2024, with a file size of 4,113,546 bytes, is part of the specification and is hereby incorporated by reference herein in its entirety.

### TECHNICAL FIELD

[0003] The present disclosure relates to engineered adenosine kinase variants, polynucleotides encoding the engineered adenosine kinase variants, and uses of the engineered enzymes.

### BACKGROUND

[0004] Adenosine kinase catalyzes the phosphorylation of adenosine (Ado) to nucleoside monophosphate (5′-AMP) using ATP as a phosphate donor, and is found ubiquitously in eukaryotes. Adenosine kinase is a key step in the purine nucleotide salvage pathway involved in maintaining the proper levels of cellular nucleotides. Phosphorylation by adenosine kinase keeps the intracellular levels of adenosine low and maintains the homeostasis of concentration gradient across the cell membrane, which makes the cytosol a reservoir for extracellular adenosine kinase under physiological conditions.

[0005] In practical applications, adenosine kinase is used in enzyme cascade reactions beginning from nucleoside substrates for ATP regeneration or production of synthetic nucleotides. Although, enzyme cascades offer the opportunity to deal with unstable or toxic intermediates and used to shift the equilibrium of thermodynamically unfavorable reactions to increase the reaction yield, use of enzyme cascades requires adaptation and optimization to circumvent incompatibility issues between the individual enzymatic reactions.

### SUMMARY

[0006] The present disclosure provides engineered adenosine kinases for use in transformation of nucleoside substrate to the corresponding nucleoside monophosphate. In some embodiments, the adenosine kinases are engineered to have an improved property compared to a reference adenosine kinase.

[0007] In one aspect, the engineered adenosine kinase comprises an amino acid sequence having at least 70%, 75%, 80%, 81%, 82%, 83%, 84%, 85%, 86%, 87%, 88%, 89%, 90%, 91%, 92%, 93%, 94%, 95%, 96%, 97%, 98%, 99%, or more sequence identity to a reference sequence corresponding to amino acid residues 12-321 of an even-numbered SEQ ID NO. of SEQ ID NOs: 2-1142, 1194-1808, and 1818-2124 or to a reference sequence corresponding to an even-numbered SEQ ID NO. of SEQ ID NOs: 2-1142, 1194-1808, and 1818-2124, wherein the amino acid sequence comprises one or more substitutions relative to the reference sequence corresponding to amino acid residues 12-321 of SEQ ID NO: 2, 90, 254, 370, 734, 896, 1196, 1366, 1382, 1464, 1568, 1616, 1668, 1766, 1826, 1918, or 1942, or relative to the reference sequence corresponding to SEQ ID NO: 2, 90, 254, 370, 734, 896, 1196, 1366, 1382, 1464, 1568, 1616, 1668, 1766, 1826, 1918, or 1942.

[0008] In some embodiments, the engineered adenosine kinase comprises an amino acid sequence having at least 70%, 75%, 80%, 81%, 82%, 83%, 84%, 85%, 86%, 87%, 88%, 89%, 90%, 91%, 92%, 93%, 94%, 95%, 96%, 97%, 98%, 99%, or more sequence identity to a reference sequence corresponding to amino acid residues 12-321 of SEQ ID NO: 2, 90, 254, 370, 734, 896, 1196, 1366, 1382, 1464, 1568, 1616, 1668, 1766, 1826, 1918, or 1942, or to a reference sequence corresponding to SEQ ID NO: 2, 90, 254, 370, 734, 896, 1196, 1366, 1382, 1464, 1568, 1616, 1668, 1766, 1826, 1918, or 1942, wherein the amino acid sequence comprises one or more substitutions relative to the reference sequence corresponding to amino acid residues 12-321 of SEQ ID NO: 2, 90, 254, 370, 734, 896, 1196, 1366, 1382, 1464, 1568, 1616, 1668, 1766, 1826, 1918, or 1942, or relative to the reference sequence corresponding to SEQ ID NO: 2, 90, 254, 370, 734, 896, 1196, 1366, 1382, 1464, 1568, 1616, 1668, 1766, 1826, 1918, or 1942.

[0009] In some embodiments, the engineered adenosine kinase comprises an amino acid sequence having at least 70%, 75%, 80%, 81%, 82%, 83%, 84%, 85%, 86%, 87%, 88%, 89%, 90%, 91%, 92%, 93%, 94%, 95%, 96%, 97%, 98%, 99%, or more sequence identity to the reference sequence corresponding to amino acid residues 12-321 of SEQ ID NO: 2, or to the reference sequence corresponding to SEQ ID NO: 2, wherein the amino acid sequence comprises one or more substitutions relative to the reference sequence corresponding to amino acid residues 12-321 of SEQ ID NO: 2, or relative to the reference sequence corresponding to SEQ ID NO: 2.

[0010] In some embodiments, the engineered adenosine kinase comprises an amino acid sequence having at least 70%, 75%, 80%, 81%, 82%, 83%, 84%, 85%, 86%, 87%, 88%, 89%, 90%, 91%, 92%, 93%, 94%, 95%, 96%, 97%, 98%, 99%, or more sequence identity to the reference sequence corresponding to amino acid residues 12-321 of SEQ ID NO: 90, 254, 370, 734, 896, 1196, 1366, 1382, 1464, 1568, 1616, 1668, 1766, 1826, 1918, or 1942, or to the reference sequence corresponding to SEQ ID NO: 90, 254, 370, 734, 896, 1196, 1366, 1382, 1464, 1568, 1616, 1668, 1766, 1826, 1918, or 1942, wherein the amino acid sequence comprises one or more substitutions relative to the reference sequence corresponding to amino acid residues 12-321 of SEQ ID NO: 2, or relative to the reference sequence corresponding to SEQ ID NO: 2.

[0011] In some embodiments, the engineered adenosine kinase comprises an amino acid sequence having at least 70%, 75%, 80%, 81%, 82%, 83%, 84%, 85%, 86%, 87%, 88%, 89%, 90%, 91%, 92%, 93%, 94%, 95%, 96%, 97%, 98%, 99%, or more sequence identity to a reference sequence corresponding to amino acid residues 12-321 of an even-numbered SEQ ID NO. of SEQ ID NOs: 4-1142, 1194-1808 and 1818-2124, or to a reference sequence corresponding to an even-numbered SEQ ID NO. of SEQ ID NOs: 4-1142, 1194-1808 and 1818-2124, wherein the amino acid sequence comprises one or more substitutions relative to the reference sequence corresponding to amino acid residues 12-321 of SEQ ID NO: 2, or relative to the reference sequence corresponding to SEQ ID NO: 2.

[0012] In some embodiments, the amino acid sequence of the engineered adenosine kinase comprises at least a substitution at amino acid position 13, 14, 20, 21, 23, 24, 26, 27, 28, 29, 30, 31, 33, 34, 35, 38, 40, 41, 42, 43, 46, 49, 50, 51, 52, 53, 54, 55, 56, 64, 67, 73, 74, 77, 79, 80, 83, 86, 87, 89, 90, 91, 92, 93, 94, 100, 101, 102, 103, 104, 106, 107, 108, 109, 111, 112, 113, 116, 119, 120, 121, 126, 128, 129, 130, 133, 134, 136, 141, 144, 146, 147, 151, 152, 155, 156, 157, 160, 162, 163, 164, 167, 168, 169, 170, 171, 172, 177, 179, 180, 181, 182, 183, 185, 187, 188, 190, 191, 192, 194, 195, 196, 197, 202, 206, 207, 208, 210, 211, 212, 215, 216, 217, 218, 221, 222, 225, 229, 231, 232, 233, 234, 236, 237, 238, 239, 240, 241, 242, 243, 244, 245, 246, 247, 248, 249, 250, 251, 252, 253, 254, 255, 256, 258, 265, 271, 274, 275, 276, 287, 288, 291, 292, 293, 294, 295, 296, 299, 303, 305, 307, 308, 310, 311, 312, 314, 315, 316, 317, or 320, or combinations thereof, wherein the amino acid positions are relative to the reference sequence corresponding to amino acid residues 12-321 of SEQ ID NO: 2, or relative to the reference sequence corresponding to SEQ ID NO: 2.

[0013] In some embodiments, the amino acid sequence of the engineered adenosine kinase comprises at least a substitution, or amino acid residue 13A/E/P, 14S/T/V, 20F/V, 21G, 23N, 24I/N/V, 26F, 27A/C/G/K/P/R/S/W, 28L/M, 29G/R, 30G/Y, 31F/H/L/R/W/Y, 33A/P/Q/S, 34C/G/K/R, 35D/E/S/V/Y, 38C/R/V, 40H/M/R/W, 41L, 42D/G/N/Q, 43E/K/R/S/V, 46I, 49M, 50C, 51F/G/S, 52C/D/F/G/S/T, 53L/R, 54V, 55H, 56F/G/S/Y, 64M/T, 67G, 73A/C/E/M, 74F/I/K/R/T/V, 77V, 79A, 80M/S/V, 83F/L/S/T/V, 86L/Q, 87K, 89G/K/L/T, 90L/R/S/T/V, 91Y, 92M, 93A, 94M/N, 100G, 101F/W, 102I, 103L/Q/R, 104A/C/D/G/L/N/P/R/S/T/W/Y, 106E/G/L/M/P/R/T, 107A/G/H/S/T, 108A/C/E, 109E/G/L/P/R/S/T, 111A/G/L, 112I/L, 113G/S, 116M, 119C/G/M/Q/R/S/T/V, 120C, 121F/H/L/M/Q, 126L/S, 128F/V/W, 129A/G/S, 130A, 133A/L, 134H, 136F/H, 141S, 144Q/S, 146C/I, 147A/N/S, 151L, 152A/C, 155A/I/N/T/V/W, 156Y, 157P, 160L, 162F, 163G, 164A/G/K/Q/S/W, 167F/T/V/W, 168R/V, 169A/C/D/I/L/M/S, 170D/H/K/M/R/S/V, 171C/V, 172S, 177V, 179N, 180Q, 181A/C/L/V, 182G, 183M/S/V, 185S/T, 187H/Q/S/V, 188T, 190I, 191A/R/S/W, 192L, 194A/R, 195G/M/T/V, 196S, 197R, 202F, 206A/H, 207A/L/M/R/T/V, 211A/C/F/H/I/K/L/M/R/T/W, 212A, 215L, 216V, 217A/V, 218D/L/N/R/V, 221A, 222A/G/M/Q, 225E/G, 229C/H/V, 231L/M/V, 232S, 233A/S/V, 234A/M/N/R/V/Y, 236C/S/V, 237K/I/L/M/Q/V, 238L, 239A/F/G/H/I/M/Q/R/T/W, 240L/V, 241R, 242D/T, 243F/G/R/Y, 244R/W, 245F/Q/W, 246A/R/S/T/V, 247L, 248E/G/K/L/R/V, 249A/G/I/L/M/R/S, 250H/I/M/T, 251K/L/T/V, 252A/C/G/K/T/V, 253D/E/G/H/K/L/P/S/T/V, 254I/L/M/P/Q/T, 255A/C/E/G/I/K/S/W, 256C/H/M, 258R/S/V, 265Y, 271W, 274R, 275S, 276D/E/G/S, 287A/S/V/Y, 288V, 291G, 292F/I/K/V, 293M, 294L, 295A, 296N, 299G/S, 303D/F/H/M/S/V/W, 305S/T, 307F/G, 308D/F/L/V, 310A/C, 311E/F/G/L/M/Q/R/S/T, 312R, 314Q/S/V, 315S, 316A/D/E/I/K/S/Y, 317M/W/Y, or 320G/R/S, or combinations thereof, wherein the amino acid positions are relative to the reference sequence corresponding to residues 12-321 of SEQ ID NO: 2, or relative to the reference sequence corresponding to SEQ ID NO: 2.

[0014] In some embodiments, the amino acid sequence of the engineered adenosine kinase comprises at least a substitution at amino acid position 24, 27, 31, 40, 43, 51, 52, 74, 77, 79, 109, 113, 119, 121, 126, 129, 169, 181, 185,207, 211, 233, 234, 237, 239, 244, 246, 249, 251, 252, 253, 276, 299, 305, 312, or 316, or combinations thereof, wherein the amino acid positions are relative to the reference sequence corresponding to amino acid residues 12-321 of SEQ ID NO: 2, or relative to the reference sequence corresponding to SEQ ID NO: 2.

[0015] In some embodiments, the amino acid sequence of the engineered adenosine kinase comprises at least a substitution or substitution set at amino acid position(s) 109/111, 104/111, 38, 40, 111, 55/316, 258, 106/111, 103/111, 121, 207, 316, 43, 254, 233, 130,249, 107/111, 253, 210, 136/249, 208, 34,211, 308, 181, 248, 56, 89, 67, 111/121/233/316, 111/121/181/211/233/248/308/316, 53/111/121/181/211/233/248/308/316, 53/111/121/181/211/233/248/308/316/320, 53/86/111/121/169/181/211/233/248/308/316/320, or 53/77/79/86/111/121/169/170/181/211/233/234/248/308/316/320, wherein the amino acid positions are relative to the reference sequence corresponding to amino acid residues 12-321 of SEQ ID NO: 2, or relative to the reference sequence corresponding to SEQ ID NO: 2.

[0016] In some embodiments, the amino acid sequence of the engineered adenosine kinase comprises at least one substitution set forth in Tables 7.1, 7.2, 8.1, 9.1, 10.2, 11.2, 12.2, 13.2, 14.2, 15.2, 16.2, 17.2, 18.2, 20.2, 21.2, 22.2, 23.2, 24.2, 25.2, 26.2, 27.2, 28.2, 29.2, 30.2, 31.2, 32.2, 33.2, 34.2, 35.2, 36.2, 37.2, 38.2, 39.2, 40.2, 41.2, 42.2, 43.2, 45.2, 46.2, 47.2, 48.2, 49.2 and 50.2 wherein the amino acid positions are relative to the reference sequence corresponding to amino acid residues 12-321 of SEQ ID NO: 2, or relative to the reference sequence corresponding to SEQ ID NO: 2.

[0017] In some embodiments, the amino acid sequence of the engineered adenosine kinase comprises at least a substitution or substitution set of an engineered adenosine kinase variant set forth in Tables 7.1, 7.2, 8.1, 9.1, 10.2, 11.2, 12.2, 13.2, 14.2, 15.2, 16.2, 17.2, 18.2, 20.2, 21.2, 22.2, 23.2, 24.2, 25.2, 26.2, 27.2, 28.2, 29.2, 30.2, 31.2, 32.2, 33.2, 34.2, 35.2, 36.2, 37.2, 38.2, 39.2, 40.2, 41.2, 42.2, 43.2, 45.2, 46.2, 47.2, 48.2, 49.2 and 50.2, wherein the amino acid positions are relative to the reference sequence corresponding to amino acid residues 12-321 of SEQ ID NO: 2, or relative to the reference sequence corresponding to SEQ ID NO: 2.

[0018] In some embodiments, the engineered adenosine kinase comprises an amino acid sequence having at least 70%, 75%, 80%, 81%, 82%, 83%, 84%, 85%, 86%, 87%, 88%, 89%, 90%, 91%, 92%, 93%, 94%, 95%, 96%, 97%, 98%, 99% or more sequence identity to a reference amino acid sequence comprising a substitution or substitution set of an engineered adenosine kinase variant set forth in Tables 7.1, 7.2, 8.1, 9.1, 10.2, 11.2, 12.2, 13.2, 14.2, 15.2, 16.2, 17.2, 18.2, 20.2, 21.2, 22.2, 23.2, 24.2, 25.2, 26.2, 27.2, 28.2, 29.2, 30.2, 31.2, 32.2, 33.2, 34.2, 35.2, 36.2, 37.2, 38.2, 39.2, 40.2, 41.2, 42.2, 43.2, 45.2, 46.2, 47.2, 48.2, 49.2 and 50.2, wherein the amino acid positions are relative to the reference sequence corresponding to amino acid residues 12-321 of SEQ ID NO: 2, or relative to the reference sequence corresponding to SEQ ID NO: 2.

[0019] In some embodiments, the engineered adenosine kinase comprises an amino acid sequence having at least 70%, 75%, 80%, 81%, 82%, 83%, 84%, 85%, 86%, 87%, 88%, 89%, 90%, 91%, 92%, 93%, 94%, 95%, 96%, 97%, 98%, 99%, or more sequence identity to the reference sequence corresponding to residues 12-321 of SEQ ID NO: 90, 254, 370, 734, 896, 1196, 1366, 1382, 1464, 1568, 1616, 1668, 1766, 1826, 1918, or 1942, or to the reference sequence corresponding to SEQ ID NO: 90, 254, 370, 734, 896, 1196, 1366, 1382, 1464, 1568, 1616, 1668, 1766, 1826, 1918, or 1942.

[0020] In some embodiments, the engineered adenosine kinase comprises an amino acid sequence having at least 70%, 75%, 80%, 81%, 82%, 83%, 84%, 85%, 86%, 87%, 88%, 89%, 90%, 91%, 92%, 93%, 94%, 95%, 96%, 97%, 98%, 99%, or more sequence identity to a reference sequence corresponding to residues 12-321 of an even-numbered SEQ ID NO. of SEQ ID NOs: 4-1142, 1194-1808 and 1818-2124, or to a reference sequence corresponding to an even-numbered SEQ ID NO. of SEQ ID NOs: 4-1142, 1194-1808 and 1818-2124.

[0021] In some embodiments, the engineered adenosine kinase comprises an amino acid sequence having at least 70%, 75%, 80%, 81%, 82%, 83%, 84%, 85%, 86%, 87%, 88%, 89%, 90%, 91%, 92%, 93%, 94%, 95%, 96%, 97%, 98%, 99%, or more sequence identity to the reference sequence corresponding to residues 12-321 of SEQ ID NO: 90, 254, 370, 734, 896, 1196, 1366, 1382, 1464, 1568, 1616, 1668, 1766, 1826, 1918, or 1942, or to the reference sequence corresponding to SEQ ID NO: 90, 254, 370, 734, 896, 1196, 1366, 1382, 1464, 1568, 1616, 1668, 1766, 1826, 1918, or 1942, wherein the amino acid sequence comprises one or more substitutions relative to the reference sequence corresponding to residues 12-321 of SEQ ID NO: 90, 254, 370, 734, 896, 1196, 1366, 1382, 1464, 1568, 1616, 1668, 1766, 1826, 1918, or 1942, or relative to the reference sequence corresponding to SEQ ID NO: 90, 254, 370, 734, 896, 1196, 1366, 1382, 1464, 1568, 1616, 1668, 1766, 1826, 1918, or 1942.

[0022] In some embodiments, the engineered adenosine kinase comprises an amino acid sequence having at least 70%, 75%, 80%, 81%, 82%, 83%, 84%, 85%, 86%, 87%, 88%, 89%, 90%, 91%, 92%, 93%, 94%, 95%, 96%, 97%, 98%, 99%, or more sequence identity to the reference sequence corresponding to residues 12-321 of an even-numbered SEQ ID NO. of SEQ ID NOs: 4-1142, 1194-1808 and 1818-2124, or to the reference sequence corresponding to an even-numbered SEQ ID NO. of SEQ ID NOs: 4-1142, 1194-1808 and 1818-2124, wherein the amino acid sequence comprises one or more substitutions relative to the reference sequence corresponding to residues 12-321 of SEQ ID NO: 90, 254, 370, 734, 896, 1196, 1366, 1382, 1464, 1568, 1616, 1668, 1766, 1826, 1918, or 1942, or relative to the reference sequence corresponding to SEQ ID NO: 90, 254, 370, 734, 896, 1196, 1366, 1382, 1464, 1568, 1616, 1668, 1766, 1826, 1918, or 1942.

[0023] In some embodiments, the amino acid sequence of the engineered adenosine kinase comprises at least a substitution at amino acid position 13, 14, 20, 21, 23, 24, 27, 29, 30, 31, 33, 34, 35, 38, 40, 41, 42, 43, 49, 50, 51, 52, 53, 54, 55, 56, 64, 67, 73, 74, 77, 79, 80, 83, 86, 87, 89, 90, 91, 92, 93, 94, 100, 101, 102, 103, 104, 106, 107, 108, 109, 111, 112, 113, 116, 119, 120, 121, 126, 128, 129, 130, 133, 134, 136, 141, 144, 146, 147, 151, 152, 155, 156, 157, 160, 162, 163, 164, 167, 168, 169, 170, 171, 172, 177, 180, 181, 182, 183, 185, 187, 188, 190, 191, 192, 194, 195, 196, 197, 202, 206, 207, 208, 210, 211, 215, 216, 217, 218, 221, 222, 225, 229, 231, 232, 233, 234, 236, 237, 238, 239, 240, 241, 242, 243, 244, 245, 246, 247, 248, 249, 250, 251, 252, 253, 254, 255, 256, 258, 265, 271, 276, 287, 288, 291, 292, 294, 295, 296, 299, 303, 305, 307, 308, 310, 311, 312, 314, 316, 317, or 320, or combinations thereof, wherein the amino acid positions are relative to the reference sequence corresponding to amino acid residues 12-321 of SEQ ID NO: 90, 254, 370, 734, 896, 1196, 1366, 1382, 1464, 1568, 1616, 1668, 1766, 1826, 1918, or 1942, or relative to the reference sequence corresponding to SEQ ID NO: 90, 254, 370, 734, 896, 1196, 1366, 1382, 1464, 1568, 1616, 1668, 1766, 1826, 1918, or 1942.

[0024] In some embodiments, the amino acid sequence of the engineered adenosine kinase comprises at least a substitution at amino acid position 24, 27, 31, 40, 43, 51, 52, 74, 77, 79, 109, 113, 119, 121, 126, 129, 169, 181, 185, 207, 211, 233, 234, 237, 239, 244, 246, 249, 251, 252, 253, 276, 299, 305, 312, or 316, or combinations thereof, wherein the amino acid positions are relative to the reference sequence corresponding to amino acid residues 12-321 of SEQ ID NO: 90, 254, 370, 734, 896, 1196, 1366, 1382, 1464, 1568, 1616, 1668, 1766, 1826, 1918, or 1942, or relative to the reference sequence corresponding to SEQ ID NO: 90, 254, 370, 734, 896, 1196, 1366, 1382, 1464, 1568, 1616, 1668, 1766, 1826, 1918, or 1942.

[0025] In some embodiments, the engineered adenosine kinase comprises an amino acid sequence having at least 70%, 75%, 80%, 81%, 82%, 83%, 84%, 85%, 86%, 87%, 88%, 89%, 90%, 91%, 92%, 93%, 94%, 95%, 96%, 97%, 98%, 99%, or more sequence identity to the reference sequence corresponding to residues 12-321 of SEQ ID NO: 90, or to the reference sequence corresponding to SEQ ID NO: 90, wherein the amino acid sequence comprises one or more substitutions relative to the reference sequence corresponding to residues 12-321 of SEQ ID NO: 90, or relative to the reference sequence corresponding to SEQ ID NO: 90.

[0026] In some embodiments, the engineered adenosine kinase comprises an amino acid sequence having at least 70%, 75%, 80%, 81%, 82%, 83%, 84%, 85%, 86%, 87%, 88%, 89%, 90%, 91%, 92%, 93%, 94%, 95%, 96%, 97%, 98%, 99%, or more sequence identity to the reference sequence corresponding to residues 12-321 of an even-numbered SEQ ID NO. of SEQ ID NOs: 148-358, or to the reference sequence corresponding to an even-numbered SEQ ID NO. of SEQ ID NOs: 148-358, wherein the amino acid sequence comprises one or more substitutions relative to the reference sequence corresponding to residues 12-321 of SEQ ID NO: 90, or relative to the reference sequence corresponding to SEQ ID NO: 90.

[0027] In some embodiments, the amino acid sequence of the engineered adenosine kinase comprises at least a substitution or substitution set at amino acid position(s) 111/233/316, 43/111/233/316, 109/181/316, 109/316, 111/233, 109/233/316, 38/208/211/308, 111/181/233/316, 109/111/233/316, 111/181/233/239/316, 111/233/239/316, 109/111/181/233/316, 111/181/316, 43/233, 109/111/316, 181/233, 34/211/248/249, 34/38/248/249, 34/308, 233/316, 43/233/316, 181/316, 34/249, 43/181/233/316, 34/38/103/116/253, 34, 40/43/109/181/233/316, 34/38/208/253, 103/249/253/308, 34/38/116/208, 38/249, 34/38/116/211/248/253/308, 43/109/316, 116/253, 43/111/181/316, 34/38/308, 109/111/181, 111/130/233, 233, 34/38/116/308, 109/233, 40/43/109/111/181/233/316, 109/130/181/233, 34/38/253, 253, 34/38/103/208/249, 103/208/210/253, 130/181/233/316, 109/111/130/181/233, 34/38/210/211/253/303, 103/116/208, 34/116/248/252/253, 34/38/103/210/211/249, 40/233/316, 34/38, 109/130/233, 111/130/181/233/316, 34/38/249/253, 34/38/208/248, 40/109/111/181/233/316, 130/316, 40/316, 38/116, 34/38/116, 38/116/208/210/249/253, 40/130/181/233/316, 103/248/249, or 103/248, wherein the amino acid positions are relative to the reference sequence corresponding to amino acid residues 12-321 of SEQ ID NO: 90, or relative to the reference sequence corresponding to SEQ ID NO: 90.

[0028] In some embodiments, the engineered adenosine kinase comprises an amino acid sequence having at least 70%, 75%, 80%, 81%, 82%, 83%, 84%, 85%, 86%, 87%, 88%, 89%, 90%, 91%, 92%, 93%, 94%, 95%, 96%, 97%, 98%, 99%, or more sequence identity to the reference sequence corresponding to residues 12-321 of SEQ ID NO: 254, or to the reference sequence corresponding to SEQ ID NO: 254, wherein the amino acid sequence comprises one or more substitutions relative to the reference sequence corresponding to residues 12-321 of SEQ ID NO: 254, or relative to the reference sequence corresponding to SEQ ID NO: 254.

[0029] In some embodiments, the engineered adenosine kinase comprises an amino acid sequence having at least 70%, 75%, 80%, 81%, 82%, 83%, 84%, 85%, 86%, 87%, 88%, 89%, 90%, 91%, 92%, 93%, 94%, 95%, 96%, 97%, 98%, 99%, or more sequence identity to the reference sequence corresponding to residues 12-321 of an even-numbered SEQ ID NO. of SEQ ID NOs: 360-592, or to the reference sequence corresponding to an even-numbered SEQ ID NO. of SEQ ID NOs: 360-592, wherein the amino acid sequence comprises one or more substitutions relative to the reference sequence corresponding to residues 12-321 of SEQ ID NO: 254, or relative to the reference sequence corresponding to SEQ ID NO: 254.

[0030] In some embodiments, the amino acid sequence of the engineered adenosine kinase comprises at least a substitution or substitution set at amino acid position(s) 77/111/170/211/236, 77/111/211, 77/211, 53/77/170/211/320, 53/77/211/234/320, 77/79/211/316, 77/111/234/236/308, 111/170/211/234/236/248, 111/169/170/234/236/248, 77/211/248/320, 53/169/170/234/320, 111/211/234/236/248, 77, 53/77/111/170/248, 211/234/248, 77/86/170/211/234/308/320, 77/86, 53/111/170, 77/79/111, 53/77/111/169/236, 77/211/234, 211, 53/77, 86/169/234, 53/211/234/248, 111/169/170/236/248, 77/79/211, 77/79/169/170, 77/79/86/169/236, 79/211/248, 79/211, 53/86/211/234/236, 79/170/211, 308, 53/211, 169/234/236, 77/79/169/234/236, 53/77/79, 77/111, 53/234/236, 169/170, 53/77/79/169, 53/86/234/236, 53/169/234/236, 53/234, 77/79/86/170/211/234/236/308/320, 53/170, 77/248, 53/86, 252, 180, 129, 121, 255, 119, 256, 237, 249, 20, 234, 254, 56, 287, 317, 299, 229, 250, 295, 144/255, 291, 181, 233, 248, 231, 251, 128, 156, 247, 288, or 292, wherein the amino acid positions are relative to the reference sequence corresponding to residues 12-321 of SEQ ID NO: 254, or relative to the reference sequence corresponding to SEQ ID NO: 254.

[0031] In some embodiments, the engineered adenosine kinase comprises an amino acid sequence having at least 70%, 75%, 80%, 81%, 82%, 83%, 84%, 85%, 86%, 87%, 88%, 89%, 90%, 91%, 92%, 93%, 94%, 95%, 96%, 97%, 98%, 99%, or more sequence identity to the reference sequence corresponding to residues 12-321 of SEQ ID NO: 370, or to the reference sequence corresponding to SEQ ID NO: 370, wherein the amino acid sequence comprises one or more substitutions relative to the reference sequence corresponding to residues 12-321 of SEQ ID NO: 370, or relative to the reference sequence corresponding to SEQ ID NO: 370.

[0032] In some embodiments, the engineered adenosine kinase comprises an amino acid sequence having at least 70%, 75%, 80%, 81%, 82%, 83%, 84%, 85%, 86%, 87%, 88%, 89%, 90%, 91%, 92%, 93%, 94%, 95%, 96%, 97%, 98%, 99%, or more sequence identity to the reference sequence corresponding to residues 12-321 of an even-numbered SEQ ID NO. of SEQ ID NOs: 594-888, or to the reference sequence corresponding to an even-numbered SEQ ID NO. of SEQ ID NOs: 594-888, wherein the amino acid sequence comprises one or more substitutions relative to the reference sequence corresponding to residues 12-321 of SEQ ID NO: 370, or relative to the reference sequence corresponding to SEQ ID NO: 370.

[0033] In some embodiments, the amino acid sequence of the engineered adenosine kinase comprises at least a substitution or substitution set at amino acid position(s) 299, 21, 113, 152, 169/255, 251, 294, 255, 202/211, 31, 129, 252, 27/64, 128, 248, 234, 288, 20, 111, 112, 181, 119, 64, 155, 256, 254, 292, 265, 177, 232, 120, 183, 234/252, 181/250/252/299, 119/181/234/250/299, 129/234/252, 119/129/234, 119/181/234/250/256/299, 119/181/250/252, 119/181/234/299, 234/250/252, 119/181/252/299, 129/181/234/299, 56/121/229, 181/255/299, 119/299, 119/250/255/299, 80/119/252, 119/129, 119/129/250, 181/234/252/299, 181/250/299, 252/299, 119/181/299, 119/129/299, 119/129/234/252, 119/129/234/250/299, 119/181/234/252, 129/234/255/299, 181/299, 250/252, 250/255/299, 119/234/299, 119/181/250, 56/237, 250/299, 119/234/255/256/299, 56/229/254, 119/129/181, 56/121/295/317, 119/181/250/255/256, 229, 250, 119/234, 20/229/237/317, 181/250, 119/255, 121/156/229, 56/121/237, 237/317, 56/295, 56/121/229/236/254/295, 56/254, 119/250/299, 229/237/295, 20/229/317, 229/295, 156/229, 56/121/229/237/295, 237/254, 20/56, 56/156, 56/156/254/295, 20/56/229, 119/129/181/234, 237, 56/156/229/237, 20/56/102/229, 119/181/234, 20/229, 56/121/156/237, 56/156/229, 20/56/156/229/237/295, 20/56/121/237/317, 156, 156/237/295, 20/56/121, 119/181, 20/56/229/254, 56, 121/254, 20/295, 255/256, 56/121/229/254, or 119/129/234/255/256, wherein the amino acid positions are relative to the reference sequence corresponding to residues 12-321 of SEQ ID NO: 370, or relative to the reference sequence corresponding to SEQ ID NO: 370.

[0034] In some embodiments, the engineered adenosine kinase comprises an amino acid sequence having at least 70%, 75%, 80%, 81%, 82%, 83%, 84%, 85%, 86%, 87%, 88%, 89%, 90%, 91%, 92%, 93%, 94%, 95%, 96%, 97%, 98%, 99%, or more sequence identity to the reference sequence corresponding to residues 12-321 of SEQ ID NO: 734, or to the reference sequence corresponding to SEQ ID NO: 734, wherein the amino acid sequence comprises one or more substitutions relative to the reference sequence corresponding to residues 12-321 of SEQ ID NO: 734, or relative to the reference sequence corresponding to SEQ ID NO: 734.

[0035] In some embodiments, the engineered adenosine kinase comprises an amino acid sequence having at least 70%, 75%, 80%, 81%, 82%, 83%, 84%, 85%, 86%, 87%, 88%, 89%, 90%, 91%, 92%, 93%, 94%, 95%, 96%, 97%, 98%, 99%, or more sequence identity to the reference sequence corresponding to residues 12-321 of an even-numbered SEQ ID NO. of SEQ ID NOs: 890-1142, 1192 and 1194, or to the reference sequence corresponding to an even-numbered SEQ ID NO. of SEQ ID NOs: 890-1142, 1192 and 1194, wherein the amino acid sequence comprises one or more substitutions relative to the reference sequence corresponding to residues 12-321 of SEQ ID NO: 734, or relative to the reference sequence corresponding to SEQ ID NO: 734.

[0036] In some embodiments, the amino acid sequence of the engineered adenosine kinase comprises at least a substitution or substitution set at amino acid position(s) 56/229, 21/56, 181, 181/211/251, 181/211, 21/121/299, 229, 56, 56/169, 311, 52, 170, 31/181/211, 167, 303, 222, 43, 83, 113/181/211, 251, 187, 218, 181/251, 195, 121/229, 107, 141, 31/181, 307, 100, 169, 86, 90, 164, 310, 276, 35, 56/134, 211, 50, 41, 121/169/229, 74, 225, 106, 121, 31/113/181, 191, 190, 171, 168, 31/181/211/294, 73, 31/251, 31, 196, 89, 197, 242, 51, 103, 101, 147, 40, 146, 243, 56/121/229, or 31/211, wherein the amino acid positions are relative to the reference sequence corresponding to residues 12-321 of SEQ ID NO: 734, or relative to the reference sequence corresponding to SEQ ID NO: 734.

[0037] In some embodiments, the engineered adenosine kinase comprises an amino acid sequence having at least 70%, 75%, 80%, 81%, 82%, 83%, 84%, 85%, 86%, 87%, 88%, 89%, 90%, 91%, 92%, 93%, 94%, 95%, 96%, 97%, 98%, 99%, or more sequence identity to the reference sequence corresponding to residues 12-321 of SEQ ID NO: 896, or to the reference sequence corresponding to SEQ ID NO: 896, wherein the amino acid sequence comprises one or more substitutions relative to the reference sequence corresponding to residues 12-321 of SEQ ID NO: 896, or relative to the reference sequence corresponding to SEQ ID NO: 896.

[0038] In some embodiments, the engineered adenosine kinase comprises an amino acid sequence having at least 70%, 75%, 80%, 81%, 82%, 83%, 84%, 85%, 86%, 87%, 88%, 89%, 90%, 91%, 92%, 93%, 94%, 95%, 96%, 97%, 98%, 99%, or more sequence identity to the reference sequence corresponding to residues 12-321 of an even-numbered SEQ ID NO. of SEQ ID NOs: 1196-1344, or to the reference sequence corresponding to an even-numbered SEQ ID NO. of SEQ ID NOs: 1196-1344, wherein the amino acid sequence comprises one or more substitutions relative to the reference sequence corresponding to residues 12-321 of SEQ ID NO: 896, or relative to the reference sequence corresponding to SEQ ID NO: 896.

[0039] In some embodiments, the amino acid sequence of the engineered adenosine kinase comprises at least a substitution or substitution set at amino acid position(s) 52/169, 52/141/169, 52, 41, 169, 51/52/211, 52/141/187, 51/52, 141, 41/103, 311, 167, 41/311, 133, 207, 14, 34, 241, 33, 27, 206, 217, 239, 13, 246, 162, 108, 160, 245, 92, 163, 104, 157, 215, 80, 54, 240, 210, 23, 53, 87, 188, 151, 29, 258, 238, 244, 192, 91, or 30, wherein the amino acid positions are relative to the reference sequence corresponding to residues 12-321 of SEQ ID NO: 896, or relative to the reference sequence corresponding to SEQ ID NO: 896.

[0040] In some embodiments, the engineered adenosine kinase comprises an amino acid sequence having at least 70%, 75%, 80%, 81%, 82%, 83%, 84%, 85%, 86%, 87%, 88%, 89%, 90%, 91%, 92%, 93%, 94%, 95%, 96%, 97%, 98%, 99%, or more sequence identity to the reference sequence corresponding to residues 12-321 of SEQ ID NO: 1196, or to the reference sequence corresponding to SEQ ID NO: 1196, wherein the amino acid sequence comprises one or more substitutions relative to the reference sequence corresponding to residues 12-321 of SEQ ID NO: 1196, or relative to the reference sequence corresponding to SEQ ID NO: 1196.

[0041] In some embodiments, the engineered adenosine kinase comprises an amino acid sequence having at least 70%, 75%, 80%, 81%, 82%, 83%, 84%, 85%, 86%, 87%, 88%, 89%, 90%, 91%, 92%, 93%, 94%, 95%, 96%, 97%, 98%, 99%, or more sequence identity to the reference sequence corresponding to residues 12-321 of an even-numbered SEQ ID NO. of SEQ ID NOs: 1346-1364, or to the reference sequence corresponding to an even-numbered SEQ ID NO. of SEQ ID NOs: 1346-1364, wherein the amino acid sequence comprises one or more substitutions relative to the reference sequence corresponding to residues 12-321 of SEQ ID NO: 1196, or relative to the reference sequence corresponding to SEQ ID NO: 1196.

[0042] In some embodiments, the amino acid sequence of the engineered adenosine kinase comprises at least a substitution or substitution set at amino acid position(s) 24, 234/236, 251/252, 119, 234, or 231/234, wherein the amino acid positions are relative to the reference sequence corresponding to residues 12-321 of SEQ ID NO: 1196, or relative to the reference sequence corresponding to SEQ ID NO: 1196.

[0043] In some embodiments, the engineered adenosine kinase comprises an amino acid sequence having at least 70%, 75%, 80%, 81%, 82%, 83%, 84%, 85%, 86%, 87%, 88%, 89%, 90%, 91%, 92%, 93%, 94%, 95%, 96%, 97%, 98%, 99%, or more sequence identity to the reference sequence corresponding to residues 12-321 of SEQ ID NO: 1366, or to the reference sequence corresponding to SEQ ID NO: 1366, wherein the amino acid sequence comprises one or more substitutions relative to the reference sequence corresponding to residues 12-321 of SEQ ID NO: 1366, or relative to the reference sequence corresponding to SEQ ID NO: 1366.

[0044] In some embodiments, the engineered adenosine kinase comprises an amino acid sequence having at least 70%, 75%, 80%, 81%, 82%, 83%, 84%, 85%, 86%, 87%, 88%, 89%, 90%, 91%, 92%, 93%, 94%, 95%, 96%, 97%, 98%, 99%, or more sequence identity to the reference sequence corresponding to residues 12-321 of an even-numbered SEQ ID NO. of SEQ ID NOs: 1366-1410, or to the reference sequence corresponding to an even-numbered SEQ ID NO. of SEQ ID NOs: 1366-1410, wherein the amino acid sequence comprises one or more substitutions relative to the reference sequence corresponding to residues 12-321 of SEQ ID NO: 1366, or relative to the reference sequence corresponding to SEQ ID NO: 1366.

[0045] In some embodiments, the amino acid sequence of the engineered adenosine kinase comprises at least a substitution or substitution set at amino acid position(s) 182, 121, 249, 129, 152, 237, 155, 121/129/207/237/249, 121/129/207/249, 27/121/207, 27/121/207/249, 121/207, 121/237, 121/249, 121/207/252, 27/121/129/207, 27/121/129/237, 207, 182/207, 121/129, or 121/237/252, wherein the amino acid positions are relative to the reference sequence corresponding to residues 12-321 of SEQ ID NO: 1366, or relative to the reference sequence corresponding to SEQ ID NO: 1366.

[0046] In some embodiments, the engineered adenosine kinase comprises an amino acid sequence having at least 70%, 75%, 80%, 81%, 82%, 83%, 84%, 85%, 86%, 87%, 88%, 89%, 90%, 91%, 92%, 93%, 94%, 95%, 96%, 97%, 98%, 99%, or more sequence identity to the reference sequence corresponding to residues 12-321 of SEQ ID NO: 1382, or to the reference sequence corresponding to SEQ ID NO: 1382, wherein the amino acid sequence comprises one or more substitutions relative to the reference sequence corresponding to residues 12-321 of SEQ ID NO: 1382, or relative to the reference sequence corresponding to SEQ ID NO: 1382.

[0047] In some embodiments, the engineered adenosine kinase comprises an amino acid sequence having at least 70%, 75%, 80%, 81%, 82%, 83%, 84%, 85%, 86%, 87%, 88%, 89%, 90%, 91%, 92%, 93%, 94%, 95%, 96%, 97%, 98%, 99%, or more sequence identity to the reference sequence corresponding to residues 12-321 of an even-numbered SEQ ID NO. of SEQ ID NOs: 1412-1564, or to the reference sequence corresponding to an even-numbered SEQ ID NO. of SEQ ID NOs: 1412-1564, wherein the amino acid sequence comprises one or more substitutions relative to the reference sequence corresponding to residues 12-321 of SEQ ID NO: 1382, or relative to the reference sequence corresponding to SEQ ID NO: 1382.

[0048] In some embodiments, the amino acid sequence of the engineered adenosine kinase comprises at least a substitution or substitution set at amino acid position(s) 314, 221, 170, 40, 49, 73, 194, 195, 147, 218, 216, 90, 89, 42, 211, 106, 171, 93, 296, 100, 243, 172, 51, 271, 90/171/191, 90/271, 90/191, 90/147/171/271, 191, 51/90, 187/211, 171/191, 170/211, 49/51, 51/171/191/271, 40/211, 106/187/211, 211/221, 40/170/211, 49/51/90/147/171, 51/90/171, 51/171, 49/51/191, 49/51/90/147, 49/51/171/271, 106/211/221, 187/221, 49/171/191/314, 51/191/271, 51/90/171/191/271, 52/221, 90/171/191/271, 191/271, 170/221, 50/52, 50/52/106/211, 50/211/308, 50/52/106, 40/50/187/211/308, 50/52/106/170/187/308, 40/52/170, 50/106, 50/221/308, 49/51/90/271, 40/52/170/211, 187, 50/211/221/308, or 40/50/52/221, wherein the amino acid positions are relative to the reference sequence corresponding to residues 12-321 of SEQ ID NO: 1382, or relative to the reference sequence corresponding to SEQ ID NO: 1382.

[0049] In some embodiments, the engineered adenosine kinase comprises an amino acid sequence having at least 70%, 75%, 80%, 81%, 82%, 83%, 84%, 85%, 86%, 87%, 88%, 89%, 90%, 91%, 92%, 93%, 94%, 95%, 96%, 97%, 98%, 99%, or more sequence identity to the reference sequence corresponding to residues 12-321 of SEQ ID NO: 1464, or to the reference sequence corresponding to SEQ ID NO: 1464, wherein the amino acid sequence comprises one or more substitutions relative to the reference sequence corresponding to residues 12-321 of SEQ ID NO: 1464, or relative to the reference sequence corresponding to SEQ ID NO: 1464.

[0050] In some embodiments, the engineered adenosine kinase comprises an amino acid sequence having at least 70%, 75%, 80%, 81%, 82%, 83%, 84%, 85%, 86%, 87%, 88%, 89%, 90%, 91%, 92%, 93%, 94%, 95%, 96%, 97%, 98%, 99%, or more sequence identity to the reference sequence corresponding to residues 12-321 of an even-numbered SEQ ID NO. of SEQ ID NOs: 1566-1578, or to the reference sequence corresponding to an even-numbered SEQ ID NO. of SEQ ID NOs: 1566-1578, wherein the amino acid sequence comprises one or more substitutions relative to the reference sequence corresponding to residues 12-321 of SEQ ID NO: 1464, or relative to the reference sequence corresponding to SEQ ID NO: 1464.

[0051] In some embodiments, the amino acid sequence of the engineered adenosine kinase comprises at least a substitution at amino acid position 317, 113, 21, 155, 126, 155, or 231, or combinations thereof, wherein the amino acid positions are relative to the reference sequence corresponding to residues 12-321 of SEQ ID NO: 1464, or relative to the reference sequence corresponding to SEQ ID NO: 1464.

[0052] In some embodiments, the engineered adenosine kinase comprises an amino acid sequence having at least 70%, 75%, 80%, 81%, 82%, 83%, 84%, 85%, 86%, 87%, 88%, 89%, 90%, 91%, 92%, 93%, 94%, 95%, 96%, 97%, 98%, 99%, or more sequence identity to the reference sequence corresponding to residues 12-321 of SEQ ID NO: 1568, or to the reference sequence corresponding to SEQ ID NO: 1568, wherein the amino acid sequence comprises one or more substitutions relative to the reference sequence corresponding to residues 12-321 of SEQ ID NO: 1568, or relative to the reference sequence corresponding to SEQ ID NO: 1568.

[0053] In some embodiments, the engineered adenosine kinase comprises an amino acid sequence having at least 70%, 75%, 80%, 81%, 82%, 83%, 84%, 85%, 86%, 87%, 88%, 89%, 90%, 91%, 92%, 93%, 94%, 95%, 96%, 97%, 98%, 99%, or more sequence identity to the reference sequence corresponding to residues 12-321 of an even-numbered SEQ ID NO. of SEQ ID NOs: 1580-1648, or to the reference sequence corresponding to an even-numbered SEQ ID NO. of SEQ ID NOs: 1580-1648, wherein the amino acid sequence comprises one or more substitutions relative to the reference sequence corresponding to residues 12-321 of SEQ ID NO: 1568, or relative to the reference sequence corresponding to SEQ ID NO: 1568.

[0054] In some embodiments, the amino acid sequence of the engineered adenosine kinase comprises at least a substitution or substitution set at amino acid position(s) 246, 74, 185, 244, 164, 276, 43, 163, 217, 31, 43/276, 185/187/276, 43/187/222/276, 185/187/222/276, 187/276, 185/276, 164/222, 164/187/222/276, 43/222/276, 164/187/222, 222, 43/164/185/187/222, 222/276, 239, or 53, wherein the amino acid positions are relative to the reference sequence corresponding to residues 12-321 of SEQ ID NO: 1568, or relative to the reference sequence corresponding to SEQ ID NO: 1568.

[0055] In some embodiments, the engineered adenosine kinase comprises an amino acid sequence having at least 70%, 75%, 80%, 81%, 82%, 83%, 84%, 85%, 86%, 87%, 88%, 89%, 90%, 91%, 92%, 93%, 94%, 95%, 96%, 97%, 98%, 99%, or more sequence identity to the reference sequence corresponding to residues 12-321 of SEQ ID NO: 1616, or to the reference sequence corresponding to SEQ ID NO: 1616, wherein the amino acid sequence comprises one or more substitutions relative to the reference sequence corresponding to residues 12-321 of SEQ ID NO: 1616, or relative to the reference sequence corresponding to SEQ ID NO: 1616.

[0056] In some embodiments, the engineered adenosine kinase comprises an amino acid sequence having at least 70%, 75%, 80%, 81%, 82%, 83%, 84%, 85%, 86%, 87%, 88%, 89%, 90%, 91%, 92%, 93%, 94%, 95%, 96%, 97%, 98%, 99%, or more sequence identity to the reference sequence corresponding to residues 12-321 of an even-numbered SEQ ID NO. of SEQ ID NOs: 1650-1742, or to the reference sequence corresponding to an even-numbered SEQ ID NO. of SEQ ID NOs: 1650-1742, wherein the amino acid sequence comprises one or more substitutions relative to the reference sequence corresponding to residues 12-321 of SEQ ID NO: 1616, or relative to the reference sequence corresponding to SEQ ID NO: 1616.

[0057] In some embodiments, the amino acid sequence of the engineered adenosine kinase comprises at least a substitution or substitution set at amino acid position(s) 74/239/244/246, 31/74/207/239/244/246, 31/246, 74/244, 31/74, 53/74/239/244/246, 31/74/207/244/246, 31/74/163/239/244, 31/74/239/244/246, 31/244/246, 31/53/164, 31/239/244, 239/246, 163/164/207/239/244/246, 31/74/163/246, 244, 31/239/244/246, 31/53/239/244/246, 31/207/244/246, 31, 31/53/74/239/246, 31/74/207, 31/163/207/244, 31/53/244, 31/163, 31/53/239/246, 74/207/239/244, 31/163/164/207/239/244/246, 74/207, 31/163/207/239/244, 31/74/163/164/207/246, 31/53/207/239, 207, 53/163/207/246, 31/53/74/163/207/246, 31/163/239/246/308, 31/74/207/239/308, or 163/207/246, wherein the amino acid positions are relative to the reference sequence corresponding to residues 12-321 of SEQ ID NO: 1616, or relative to the reference sequence corresponding to SEQ ID NO: 1616.

[0058] In some embodiments, the engineered adenosine kinase comprises an amino acid sequence having at least 70%, 75%, 80%, 81%, 82%, 83%, 84%, 85%, 86%, 87%, 88%, 89%, 90%, 91%, 92%, 93%, 94%, 95%, 96%, 97%, 98%, 99%, or more sequence identity to the reference sequence corresponding to residues 12-321 of SEQ ID NO: 1668, or to the reference sequence corresponding to SEQ ID NO: 1668, wherein the amino acid sequence comprises one or more substitutions relative to the reference sequence corresponding to residues 12-321 of SEQ ID NO: 1668, or relative to the reference sequence corresponding to SEQ ID NO: 1668.

[0059] In some embodiments, the engineered adenosine kinase comprises an amino acid sequence having at least 70%, 75%, 80%, 81%, 82%, 83%, 84%, 85%, 86%, 87%, 88%, 89%, 90%, 91%, 92%, 93%, 94%, 95%, 96%, 97%, 98%, 99%, or more sequence identity to the reference sequence corresponding to residues 12-321 of an even-numbered SEQ ID NO. of SEQ ID NOs: 1744-1808, or to the reference sequence corresponding to an even-numbered SEQ ID NO. of SEQ ID NOs: 1744-1808, wherein the amino acid sequence comprises one or more substitutions relative to the reference sequence corresponding to residues 12-321 of SEQ ID NO: 1668, or relative to the reference sequence corresponding to SEQ ID NO: 1668.

[0060] In some embodiments, the amino acid sequence of the engineered adenosine kinase comprises at least a substitution or substitution set at amino acid position(s) 312, 305, 246, 89, 33, 218, 147, 27/218/305/312, 27/35/106/218/312, 27/218/312, 27/312, 27/305/312, 27/106/218/312, 27/218, 27/106/312, 35/305, 27/144/312, 27/218/305, 35/312, 27/106/218/305/312, 27/35/106/312, 106/218/305, 106/218/312, 27/106/305, 27/35/94/106/305/312, 35/218/312, 218/312, 27/106/218, 35/106/312, or 27/106, wherein the amino acid positions are relative to the reference sequence corresponding to residues 12-321 of SEQ ID NO: 1668, or relative to the reference sequence corresponding to SEQ ID NO: 1668.

[0061] In some embodiments, the engineered adenosine kinase comprises an amino acid sequence having at least 70%, 75%, 80%, 81%, 82%, 83%, 84%, 85%, 86%, 87%, 88%, 89%, 90%, 91%, 92%, 93%, 94%, 95%, 96%, 97%, 98%, 99%, or more sequence identity to the reference sequence corresponding to residues 12-321 of SEQ ID NO: 1766, or to the reference sequence corresponding to SEQ ID NO: 1766, wherein the amino acid sequence comprises one or more substitutions relative to the reference sequence corresponding to residues 12-321 of SEQ ID NO: 1766, or relative to the reference sequence corresponding to SEQ ID NO: 1766.

[0062] In some embodiments, the engineered adenosine kinase comprises an amino acid sequence having at least 70%, 75%, 80%, 81%, 82%, 83%, 84%, 85%, 86%, 87%, 88%, 89%, 90%, 91%, 92%, 93%, 94%, 95%, 96%, 97%, 98%, 99%, or more sequence identity to the reference sequence corresponding to residues 12-321 of an even-numbered SEQ ID NO. of SEQ ID NOs: 1818-1870, or to the reference sequence corresponding to an even-numbered SEQ ID NO. of SEQ ID NOs: 1818-1870, wherein the amino acid sequence comprises one or more substitutions relative to the reference sequence corresponding to residues 12-321 of SEQ ID NO: 1766, or relative to the reference sequence corresponding to SEQ ID NO: 1766.

[0063] In some embodiments, the amino acid sequence of the engineered adenosine kinase comprises at least a substitution at amino acid position 34, 112, 126, 128, 155, 179, 183, 229, 236, 248, 253, 254, 292, 293, or 299, or combinations thereof, wherein the amino acid positions are relative to the reference sequence corresponding to amino acid residues 12-321 of SEQ ID NO: 1766, or relative to the reference sequence corresponding to SEQ ID NO: 1766.

[0064] In some embodiments, the engineered adenosine kinase comprises an amino acid sequence having at least 70%, 75%, 80%, 81%, 82%, 83%, 84%, 85%, 86%, 87%, 88%, 89%, 90%, 91%, 92%, 93%, 94%, 95%, 96%, 97%, 98%, 99%, or more sequence identity to the reference sequence corresponding to residues 12-321 of SEQ ID NO: 1826, or to the reference sequence corresponding to SEQ ID NO: 1826, wherein the amino acid sequence comprises one or more substitutions relative to the reference sequence corresponding to residues 12-321 of SEQ ID NO: 1826, or relative to the reference sequence corresponding to SEQ ID NO: 1826.

[0065] In some embodiments, the engineered adenosine kinase comprises an amino acid sequence having at least 70%, 75%, 80%, 81%, 82%, 83%, 84%, 85%, 86%, 87%, 88%, 89%, 90%, 91%, 92%, 93%, 94%, 95%, 96%, 97%, 98%, 99%, or more sequence identity to the reference sequence corresponding to residues 12-321 of an even-numbered SEQ ID NO. of SEQ ID NOs: 1872-1936, or to the reference sequence corresponding to an even-numbered SEQ ID NO. of SEQ ID NOs: 1872-1936, wherein the amino acid sequence comprises one or more substitutions relative to the reference sequence corresponding to residues 12-321 of SEQ ID NO: 1826, or relative to the reference sequence corresponding to SEQ ID NO: 1826.

[0066] In some embodiments, the amino acid sequence of the engineered adenosine kinase comprises at least a substitution at amino acid position 14, 38, 46, 108, 146, 211, 243, 275, 303, 311, or 320, or combinations thereof, wherein the amino acid positions are relative to the reference sequence corresponding to amino acid residues 12-321 of SEQ ID NO: 1826, or relative to the reference sequence corresponding to SEQ ID NO: 1826.

[0067] In some embodiments, the amino acid sequence of the engineered adenosine kinase comprises at least a substitution at amino acid position 94, 106, 108, 194, 274, 303, 307, or 315, or combinations thereof, wherein the amino acid positions are relative to the reference sequence corresponding to amino acid residues 12-321 of SEQ ID NO: 1826, or relative to the reference sequence corresponding to SEQ ID NO: 1826.

[0068] In some embodiments, the amino acid sequence of the engineered adenosine kinase comprises at least a substitution or substitution set at amino acid position(s) 112/183/292/299, 112/292, 126/299, 155, 155/183/299, 155/299, 183/255/299, 183/299, 229/299, 255/299, and 292, wherein the amino acid positions are relative to the reference sequence corresponding to amino acid residues 12-321 of SEQ ID NO: 1826, or relative to the reference sequence corresponding to SEQ ID NO: 1826.

[0069] In some embodiments, the engineered adenosine kinase comprises an amino acid sequence having at least 70%, 75%, 80%, 81%, 82%, 83%, 84%, 85%, 86%, 87%, 88%, 89%, 90%, 91%, 92%, 93%, 94%, 95%, 96%, 97%, 98%, 99%, or more sequence identity to the reference sequence corresponding to residues 12-321 of SEQ ID NO: 1918, or to the reference sequence corresponding to SEQ ID NO: 1918, wherein the amino acid sequence comprises one or more substitutions relative to the reference sequence corresponding to residues 12-321 of SEQ ID NO: 1918, or relative to the reference sequence corresponding to SEQ ID NO: 1918.

[0070] In some embodiments, the engineered adenosine kinase comprises an amino acid sequence having at least 70%, 75%, 80%, 81%, 82%, 83%, 84%, 85%, 86%, 87%, 88%, 89%, 90%, 91%, 92%, 93%, 94%, 95%, 96%, 97%, 98%, 99%, or more sequence identity to the reference sequence corresponding to residues 12-321 of an even-numbered SEQ ID NO. of SEQ ID NOs: 1938-2010, or to the reference sequence corresponding to an even-numbered SEQ ID NO. of SEQ ID NOs: 1938-2010, wherein the amino acid sequence comprises one or more substitutions relative to the reference sequence corresponding to residues 12-321 of SEQ ID NO: 1918, or relative to the reference sequence corresponding to SEQ ID NO: 1918.

[0071] In some embodiments, the amino acid sequence of the engineered adenosine kinase comprises at least a substitution at amino acid position 26, 27, 28, 29, 31, 33, 35, 42, 136, 212, 218, 237, 239, 245, 246, 252, 276, or 316, or combinations thereof, wherein the amino acid positions are relative to the reference sequence corresponding to amino acid residues 12-321 of SEQ ID NO: 1918, or relative to the reference sequence corresponding to SEQ ID NO: 1918.

[0072] In some embodiments, the engineered adenosine kinase comprises an amino acid sequence having at least 70%, 75%, 80%, 81%, 82%, 83%, 84%, 85%, 86%, 87%, 88%, 89%, 90%, 91%, 92%, 93%, 94%, 95%, 96%, 97%, 98%, 99%, or more sequence identity to the reference sequence corresponding to residues 12-321 of SEQ ID NO: 1942, or to the reference sequence corresponding to SEQ ID NO: 1942, wherein the amino acid sequence comprises one or more substitutions relative to the reference sequence corresponding to residues 12-321 of SEQ ID NO: 1942, or relative to the reference sequence corresponding to SEQ ID NO: 1942.

[0073] In some embodiments, the engineered adenosine kinase comprises an amino acid sequence having at least 70%, 75%, 80%, 81%, 82%, 83%, 84%, 85%, 86%, 87%, 88%, 89%, 90%, 91%, 92%, 93%, 94%, 95%, 96%, 97%, 98%, 99%, or more sequence identity to the reference sequence corresponding to residues 12-321 of an even-numbered SEQ ID NO. of SEQ ID NOs: 2012-2124, or to the reference sequence corresponding to an even-numbered SEQ ID NO. of SEQ ID NOs: 2012-2124, wherein the amino acid sequence comprises one or more substitutions relative to the reference sequence corresponding to residues 12-321 of SEQ ID NO: 1942, or relative to the reference sequence corresponding to SEQ ID NO: 1942.

[0074] In some embodiments, the amino acid sequence of the engineered adenosine kinase comprises at least a substitution or substitution set at amino acid position(s) 26/27, 26/27/28, 26/27/28/31, 26/27/28/245, 26/28/31, 27, 27/28, 27/28/29/126, 27/29, 27/29/126, 27/29/237, 27/29/245, 27/31/126/245, 27/31/155, 27/126, 27/126/155, 27/126/237, 27/126/237/245, 27/237, 27/245, 28, 28/31, 28/31/239, 28/42/126/245, 28/42/245, 28/239, 29/31, 29/31/126/239, 30/31/33/35/126/218, 30/31/33/126/276/316, 30/33/35, 31/33/218/276, 31/126, 31/126/155, 33, 33/126/239, 42, 126, 126/155, 126/155/237, 126/155/239/276, 126/155/239/316, 126/239, 126/239/316, 126/245, 126/316, 155/276/316, 155/316, 218, 218/239/316, 239, 245, 252/276, and 316, wherein the amino acid positions are relative to the reference sequence corresponding to amino acid residues 12-321 of SEQ ID NO: 1942, or relative to the reference sequence corresponding to SEQ ID NO: 1942.

[0075] In some embodiments, the amino acid sequence of the engineered adenosine kinase comprises at least one substitution set forth in Tables 7.1, 7.2, 8.1, 9.1, 10.2, 11.2, 12.2, 13.2, 14.2, 15.2, 16.2, 17.2, 18.2, 20.2, 21.2, 22.2, 23.2, 24.2, 25.2, 26.2, 27.2, 28.2, 29.2, 30.2, 31.2, 32.2, 33.2, 34.2, 35.2, 36.2, 37.2, 38.2, 39.2, 40.2, 41.2, 42.2, 43.2, 45.2, 46.2, 47.2, 48.2, 49.2 and 50.2, wherein the amino acid positions are relative to the reference sequence corresponding to amino acid residues 12-321 of SEQ ID NO: 2, 90, 254, 370, 734, 896, 1196, 1366, 1382, 1464, 1568, 1616, 1668, 1766, 1826, 1918, or 1942, or relative to the reference sequence corresponding to SEQ ID NO: 2, 90, 254, 370, 734, 896, 1196, 1366, 1382, 1464, 1568, 1616, 1668, 1766, 1826, 1918, or 1942.

[0076] In some embodiments, the amino acid sequence of the engineered adenosine kinase comprises at least a substitution or substitution set of an engineered adenosine kinase variant set forth in Tables 7.1, 7.2, 8.1, 9.1, 10.2, 11.2, 12.2, 13.2, 14.2, 15.2, 16.2, 17.2, 18.2, 20.2, 21.2, 22.2, 23.2, 24.2, 25.2, 26.2, 27.2, 28.2, 29.2, 30.2, 31.2, 32.2, 33.2, 34.2, 35.2, 36.2, 37.2, 38.2, 39.2, 40.2, 41.2, 42.2, 43.2, 45.2, 46.2, 47.2, 48.2, 49.2 and 50.2, wherein the amino acid positions are relative to the reference sequence corresponding to amino acid residues 12-321 of SEQ ID NO: 2, 90, 254, 370, 734, 896, 1196, 1366, 1382, 1464, 1568, 1616, 1668, 1766, 1826, 1918, or 1942, or relative to the reference sequence corresponding to SEQ ID NO: 2, 90, 254, 370, 734, 896, 1196, 1366, 1382, 1464, 1568, 1616, 1668, 1766, 1826, 1918, or 1942.

[0077] In some embodiments, the engineered adenosine kinase comprises an amino acid sequence having at least 70%, 75%, 80%, 81%, 82%, 83%, 84%, 85%, 86%, 87%, 88%, 89%, 90%, 91%, 92%, 93%, 94%, 95%, 96%, 97%, 98%, 99% or more sequence identity to a reference amino acid sequence comprising a substitution or substitution set of an engineered adenosine kinase variant set forth in Tables 7.1, 7.2, 8.1, 9.1, 10.2, 11.2, 12.2, 13.2, 14.2, 15.2, 16.2, 17.2, 18.2, 20.2, 21.2, 22.2, 23.2, 24.2, 25.2, 26.2, 27.2, 28.2, 29.2, 30.2, 31.2, 32.2, 33.2, 34.2, 35.2, 36.2, 37.2, 38.2, 39.2, 40.2, 41.2, 42.2, 43.2, 45.2, 46.2, 47.2, 48.2, 49.2 and 50.2, wherein the amino acid positions are relative to the reference sequence corresponding to amino acid residues 12-321 of SEQ ID NO: 2, 90, 254, 370, 734, 896, 1196, 1366, 1382, 1464, 1568, 1616, 1668, 1766, 1826, 1918, or 1942, or relative to the reference sequence corresponding to SEQ ID NO: 2, 90, 254, 370, 734, 896, 1196, 1366, 1382, 1464, 1568, 1616, 1668, 1766, 1826, 1918, or 1942.

[0078] In some embodiments, the engineered adenosine kinase comprises an amino acid sequence comprising residues 12-321 of an even-numbered SEQ ID NO. of SEQ ID NOs: 4-1142, 1194-1808 and 1818-2124, or comprises an even-numbered SEQ ID NO. of SEQ ID NOs: 4-1142, 1194-1808 and 1818-2124, optionally wherein the amino acid sequence has 1, 2, 3, 4, 5, 6, 7, 8, 9, or up to 10 substitutions.

[0079] In some embodiments, the engineered adenosine kinase comprises an amino acid sequence comprising residues 12-321 of SEQ ID NO: 90, 254, 370, 734, 896, 1196, 1366, 1382, 1464, 1568, 1616, 1668, 1766, 1826, 1918, or 1942, or wherein the amino acid sequence comprises SEQ ID NO: 90, 254, 370, 734, 896, 1196, 1366, 1382, 1464, 1568, 1616, 1668, 1766, 1826, 1918, or 1942, optionally wherein the amino acid sequence has 1, 2, 3, 4, 5, 6, 7, 8, 9, or up to 10 substitutions.

[0080] In some embodiments, the engineered adenosine kinase has adenosine kinase activity and at least one improved property as compared to a reference adenosine kinase. In some embodiments, the engineered adenosine kinase has an improved property selected from i) increased activity on unmodified nucleoside, ii) increased thermostability, iii) increased activity on cytidine, iv) increased activity on 2-fluoro modified nucleosides, and v) increased activity on 2-O-methyl modified nucleosides, or any combinations of i), ii), iii), iv), and v), compared to a reference adenosine kinase. In some embodiments, the reference adenosine kinase has an amino acid sequence corresponding to residue 12-321 of SEQ ID NO: 2, 90, 254, 370, 734, 896, 1196, 1366, 1382, 1464, 1568, 1616, 1668, 1766, 1826, 1918, or 1942, or an amino acid sequence corresponding to SEQ ID NO: 2, 90, 254, 370, 734, 896, 1196, 1366, 1382, 1464, 1568, 1616, 1668, 1766, 1826, 1918, or 1942. In some embodiments, the reference adenosine kinase has an amino acid sequence corresponding to residues 12-321 of SEQ ID NO: 2, or an amino acid sequence corresponding to SEQ ID NO: 2.

[0081] In some embodiments, the engineered adenosine kinase is purified or provided as a purified preparation. In some embodiments, the engineered adenosine kinase is immobilized on a substrate.

[0082] In another aspect, the present disclosure provides a recombinant polynucleotide comprising a polynucleotide sequence encoding an engineered adenosine kinase described herein.

[0083] In some embodiments, the recombinant polynucleotide comprises a polynucleotide sequence having at least 70%, 75%, 80%, 81%, 82%, 83%, 84%, 85%, 86%, 87%, 88%, 89%, 90%, 91%, 92%, 93%, 94%, 95%, 96%, 97%, 98%, 99%, or more sequence identity to a reference polynucleotide sequence corresponding to nucleotide residues 34-963 of SEQ ID NO: 1, 89, 253, 369, 733, 895, 1195, 1365, 1381, 1463, 1567, 1615, 1667, 1765, 1825, 1917, 1941, or 2013, or to a reference polynucleotide sequence corresponding to SEQ ID NO: 1, 89, 253, 369, 733, 895, 1195, 1365, 1381, 1463, 1567, 1615, 1667, 1765, 1825, 1917, 1941, or 2013, wherein the recombinant polynucleotide encodes an adenosine kinase.

[0084] In some embodiments, the recombinant polynucleotide comprises a polynucleotide sequence having at least 70%, 75%, 80%, 81%, 82%, 83%, 84%, 85%, 86%, 87%, 88%, 89%, 90%, 91%, 92%, 93%, 94%, 95%, 96%, 97%, 98%, 99%, or more sequence identity to a reference polynucleotide sequence corresponding to nucleotide residues 34-963 of an odd-numbered SEQ ID NO. of SEQ ID NOs: 3-1141, 1193-1807, and 1817-2123 or to a reference polynucleotide sequence corresponding to an odd-numbered SEQ ID NO. of SEQ ID NOs: 3-1141, 1193-1807, and 1817-2123 wherein the recombinant polynucleotide encodes an engineered adenosine kinase.

[0085] In some embodiments, the polynucleotide sequence of the recombinant polynucleotide has preferred codons for expression in a host cell. In some embodiments, the polynucleotide sequence of the recombinant polynucleotide is codon optimized.

[0086] In some embodiments, the recombinant polynucleotide comprises a polynucleotide sequence comprising nucleotide residues 34-963 of SEQ ID NO: 1, 89, 253, 369, 733, 895, 1195, 1365, 1381, 1463, 1567, 1615, 1667, 1765, 1825, 1917, 1941, or 2013, or comprises SEQ ID NO: 1, 89, 253, 369, 733, 895, 1195, 1365, 1381, 1463, 1567, 1615, 1667, 1765, 1825, 1917, 1941, or 2013.

[0087] In some embodiments, the recombinant polynucleotide comprises a polynucleotide sequence comprising nucleotide residues 34-963 of an odd-numbered SEQ ID NO. of SEQ ID NOs: 3-1141, 1193-1807, and 1817-2123, or comprises an odd-numbered SEQ ID NO. of SEQ ID NOs: 3-1141, 1193-1807, and 1817-2123.

[0088] In another aspect, the present disclosure provides an expression vector comprising a recombinant polynucleotide encoding an engineered adenosine kinase described herein. In some embodiments, the expression vector comprises a recombinant polynucleotide operably linked to a control sequence.

[0089] In a further aspect, the present disclosure provides a host cell comprising an expression vector for expression of an engineered adenosine kinase. In some embodiments, the host cell is a bacterial cell, fungal cell, insect cell, or mammalian cell.

[0090] In a further aspect, the present disclosure provides a method of producing an engineered adenosine kinase polypeptide, comprising culturing a host cell under suitable culture conditions such that the engineered adenosine kinase polypeptide is produced. In some embodiments, the method further comprises recovering or isolating the engineered adenosine kinase polypeptide from the culture and/or host cells. In some embodiments, the method further comprises purifying the engineered adenosine kinase polypeptide.

[0091] In another aspect, the present disclosure provides a composition comprising an engineered adenosine kinase described herein. In some embodiments, the composition is a solution or a lyophilizate. In some embodiments, the composition further comprises one or more of buffer, a nucleoside substrate, and a phosphate donor. In some embodiments, the nucleoside substrate comprises a modified nucleoside substrate. In some embodiments, the composition further comprises another enzyme, for example, an adenylate kinase, acetate kinase, 3′-O-kinase, and/or pyruvate oxidase.

[0092] In another aspect, the engineered adenosine kinases are used in the conversion of a nucleoside substrate to the corresponding nucleoside monophosphate. In some embodiments, a method of converting a nucleoside to corresponding nucleoside monophosphate (NMP) comprises contacting a nucleoside with an engineered adenosine kinase described herein in the presence of a suitable phosphate donor under suitable reaction conditions to convert the nucleoside to the corresponding nucleoside monophosphate (NMP). In some embodiments, the nucleoside substrate comprises a modified nucleoside substrate. In some embodiments, the modified nucleoside substrate comprises a modified sugar moiety and/or nucleobase.

[0093] In some embodiments, the phosphate donor is a nucleoside triphosphate, also referred to as phosphate donor NTP. In some embodiments, the phosphate donor NTP is adenosine-5′-gamma-thiotriphosphate (ATPyS) or deoxyadenosine-5′-gamma-thiotriphosphate (dATPyS), thereby resulting in product nucleoside 5′-O-thiophosphate (NMP-S). In some embodiments, the phosphate donor NTP has the same nucleoside structure of the nucleoside substrate.

### DETAILED DESCRIPTION

[0094] The present disclosure provides engineered adenosine kinase enzyme, recombinant polynucleotide encoding the engineered adenosine kinases, and methods of using the engineered adenosine kinases. In some embodiments, are engineered to have an improved property compared to a reference adenosine kinase.

### Abbreviations and Definitions

[0095] In reference to the present invention, the technical and scientific terms used in the descriptions herein will have the meanings commonly understood by one of ordinary skill in the art, unless specifically defined otherwise. Accordingly, the following terms are intended to have the following meanings.

[0096] As used herein, the singular forms “a”, “an” and “the” include plural referents unless the context clearly indicates otherwise. Thus, for example, reference to “a polypeptide” includes more than one polypeptide.

[0097] Similarly, “comprise,” “comprises,” “comprising” “include,” “includes,” and “including” are interchangeable and not intended to be limiting. Thus, as used herein, the term “comprising” and its cognates are used in their inclusive sense (i.e., equivalent to the term “including” and its corresponding cognates).

[0098] It is to be further understood that where descriptions of various embodiments use the term “comprising,” those skilled in the art would understand that in some specific instances, an embodiment can be alternatively described using language “consisting essentially of” or “consisting of.”

[0099] “About” means an acceptable error for a particular value. In some instances, “about” means within 0.05%, 0.5%, 1.0%, or 2.0%, of a given value range. In some instances, “about” means within 1, 2, 3, or 4 standard deviations of a given value.

[0100] “EC” number refers to the Enzyme Nomenclature of the Nomenclature Committee of the International Union of Biochemistry and Molecular Biology (NC-IUBMB). The IUBMB biochemical classification is a numerical classification system for enzymes based on the chemical reactions they catalyze.

[0101] “ATCC” refers to the American Type Culture Collection whose biorepository collection includes genes and strains.

[0102] “NCBI” refers to National Center for Biological Information and the sequence databases provided therein.

[0103] “Adenosine kinase,” “AdoK,” or “Adk,” refers to an enzyme that catalyzes the phosphorylation of adenosine (A or ADO) to adenosine-5′-monophosphate (AMP). In some embodiments, adenosine kinase is classified in EC 2.7.1.20. Although the primary substrate is adenosine, adenosine kinases as used herein include enzymes that act on other nucleosides.

[0104] “Creatine kinase” refers to an enzyme that catalyzes the reversible interconversion of creatine:ATP to creatine phosphate:ADP.

[0105] “Polyphosphate kinase” refers to an enzyme that catalyzes the transfer of phosphate group(s) from high-energy, phosphate-donating molecules, such as polyphosphate (PolyPn), to specific substrates/molecules. Two families of polyphosphate kinases, PPKK1 and PPK2, are known. PPK1s preferentially synthesize polyphosphate from NTP and the corresponding reverse reaction, and PPK2s preferentially consume polyphosphate to phosphorylate nucleoside mono- or diphosphates, and the corresponding reverse reactions. In some embodiments, polyphosphate kinase includes enzymes classified in EC 2.7.4.1.

[0106] “Acetate kinase (“AcK”) refers to enzymes that are capable of catalyzing the phosphorylation of nucleoside diphosphates or analogues thereof, to nucleoside triphosphates or the corresponding analogues, using acetyl phosphate or another phosphoryl group donor. Acetate kinases as used herein includes naturally occurring, wild-type enzymes or engineered enzymes. In some embodiments, acetate kinases are naturally occurring, wild-type basic metabolic enzymes found primarily in prokaryotes that catalyze the following reaction: acetate+ATP↔acetyl phosphate+ADP. Acetyl phosphate is an intermediate in the formation of acetyl-CoA. In some embodiments, acetate kinases are derived from the naturally occurring, wild-type enzymes.

[0107] “Adenylate kinase,” “AdyK,” or “Ayk” refers to an enzyme that catalyzes the interconversion of ATP, ADP, and AMP through transfer of phosphoryl groups. In some embodiments, adenylate kinase also includes enzymes capable of catalyzing the interconversion of NTP, NDP and NMP. In some embodiments, adenylate kinase are enzymes classified in EC 2.7.3.4.

[0108] “Pyruvate oxidase” or “Pox” refers to an enzyme that catalyzes the catalyzes the reaction between pyruvate, inorganic phosphate, and oxygen to generate acetyl phosphate and H₂O₂. In some embodiments, pyruvate oxidase include enzymes classified in EC 1.2.3.3.

[0109] “Catalase” refers to an enzyme that converts hydrogen peroxide (H₂O₂) to H₂O and O₂. Catalase can be used to remove residual hydrogen peroxide in applications where hydrogen peroxide is present or is a product in a process. In some embodiments, catalases includes enzymes classified in EC 1.11.1.6.

[0110] “Protein,” “polypeptide,” and “peptide” are used interchangeably herein to denote a polymer of at least two amino acids covalently linked by an amide bond, regardless of length or post-translational modification (e.g., glycosylation or phosphorylation). Included within this definition are D- and L-amino acids, and mixtures of D- and L-amino acids, as well as polymers comprising D- and L-amino acids, and mixtures of D- and L-amino acids.

[0111] “Fusion protein,” and “chimeric protein” and “chimera” refer to hybrid proteins created through the joining of two or more polynucleotides that originally encode separate proteins. In some embodiments, fusion proteins are created by recombinant technology (e.g., molecular biology techniques known in the art).

[0112] “Amino acids” are referred to herein by either their commonly known three-letter symbols or by the one-letter symbols recommended by IUPAC-IUB Biochemical Nomenclature Commission.

[0113] Nucleotides, likewise, may be referred to by their commonly accepted single letter codes. The abbreviations used for the genetically encoded amino acids are conventional and are as follows: alanine (Ala or A), arginine (Arg or R), asparagine (Asn or N), aspartate (Asp or D), cysteine (Cys or C), glutamate (Glu or E), glycine (Gly or G), glutamine (Gln or Q), histidine (His or H), isoleucine (Ile or I), leucine (Leu or L), lysine (Lys or K), methionine (Met or M), phenylalanine (Phe or F), proline (Pro or P), serine (Ser or S), threonine (Thr or T), tryptophan (Trp or W), tyrosine (Tyr or Y), and valine (Val or V). When the three-letter abbreviations are used, unless specifically preceded by an “L” or a “D” or clear from the context in which the abbreviation is used, the amino acid may be in either the L- or D-configuration about α-carbon (Ca). For example, whereas “Ala” designates alanine without specifying the configuration about the α-carbon, “D-Ala” and “L-Ala” designate D-alanine and L-alanine, respectively. When the one-letter abbreviations are used, upper case letters designate amino acids in the L-configuration about the α-carbon and lower case letters designate amino acids in the D-configuration about the α-carbon. For example, “A” designates L-alanine and “a” designates D-alanine. When polypeptide sequences are presented as a string of one-letter or three-letter abbreviations (or mixtures thereof), the sequences are presented in the amino (N) to carboxy (C) direction in accordance with common convention.

[0114] “Polynucleotide” and “nucleic acid’ refer to two or more nucleotides that are covalently linked together. The polynucleotide may be wholly comprised of ribonucleotides (i.e., RNA), wholly comprised of 2′ deoxyribonucleotides (i.e., DNA), or comprised of mixtures of ribo- and 2′ deoxyribonucleotides. While the nucleosides will typically be linked together via standard phosphodiester linkages, the polynucleotides may include one or more non-standard linkages. The polynucleotide may be single-stranded or double-stranded, or may include both single-stranded regions and double-stranded regions. Moreover, while a polynucleotide will typically be composed of the naturally occurring encoding nucleobases (i.e., adenine, guanine, uracil, thymine and cytosine), it may include one or more modified and/or synthetic nucleobases, such as, for example, inosine, xanthine, hypoxanthine, etc. In some embodiments, such modified or synthetic nucleobases are nucleobases encoding amino acid sequences.

[0115] The abbreviations used for the genetically encoding nucleosides are conventional and are as follows: adenosine (A); guanosine (G); cytidine (C); thymidine (T); and uridine (U). Unless specifically delineated, the abbreviated nucleosides may be either ribonucleosides or 2′-deoxyribonucleosides. The nucleosides may be specified as being either ribonucleosides or 2′-deoxyribonucleosides on an individual basis or on an aggregate basis. When nucleic acid sequences are presented as a string of one-letter abbreviations, the sequences are presented in the 5′ to 3′ direction in accordance with common convention, and the phosphates are not indicated.

[0116] “Nucleobase” or “base” refers to those naturally occurring and synthetic heterocyclic moieties commonly known to those who utilize nucleic acid or polynucleotide technology to thereby generate polymers that can hybridize to polynucleotides in a sequence-specific manner. Non-limiting examples of nucleobases include, among others, adenine, cytosine, guanine, thymine, uracil, 5-propynyl-uracil, 2-thio-5-propynyl-uracil, 5-methylcytosine, pseudoisocytosine, pseudoisouridine, 2-thiouracil and 2-thiothymine, 2-aminopurine, N9-(2-amino-6-chloropurine), N9-(2,6-diaminopurine), hypoxanthine, N9-(7-deaza-guanine), N9-(7-deaza-8-aza-guanine) and N8-(7-deaza-8-aza-adenine).

[0117] “Nucleoside” refers to glycosylamines comprising a nucleobase, and a 5-carbon sugar (e.g., ribose or deoxyribose). Non-limiting examples of nucleosides include cytidine, uridine, adenosine, guanosine, thymidine, and inosine. In contrast, the term “nucleotide” refers to the glycosylamines comprising a nucleobase, a 5-carbon sugar, and one or more phosphate groups, as further described herein. In some embodiments, nucleosides can be phosphorylated by kinases to produce nucleotides.

[0118] “Nucleoside monophosphate” or “NMP” refers to glycosylamines comprising a nucleobase, a 5-carbon sugar (e.g., ribose, deoxyribose, or arabinose), and a phosphate moiety at the 5′-position. In some embodiments herein, “nucleoside monophosphate” is abbreviated as “NMP”. Non-limiting examples of nucleoside monophosphates include cytidine monophosphate (CMP), uridine monophosphate (UMP), adenosine monophosphate (AMP), guanosine monophosphate (GMP), thymidine monophosphate (TMP), and inosine monophosphate (IMP). In some embodiments, “nucleoside monophosphate” may refer to a non-natural nucleoside monophosphate. The terms “nucleoside” and “nucleotide” may be used interchangeably in some contexts.

[0119] “Nucleoside diphosphate” or “NDP” refers to glycosylamines comprising a nucleobase, a 5-carbon sugar (e.g., ribose or deoxyribose), and a diphosphate (i.e., pyrophosphate) moiety at the 5′-position. In some embodiments herein, “nucleoside diphosphate” is abbreviated as “NDP”. Non-limiting examples of nucleoside diphosphates include cytidine diphosphate (CDP), uridine diphosphate (UDP), adenosine diphosphate (ADP), guanosine diphosphate (GDP), thymidine diphosphate (TDP), and inosine diphosphate (IDP). In some embodiments, “nucleoside diphosphate” may refer to a non-natural nucleoside diphosphate. The terms “nucleoside” and “nucleotide” may be used interchangeably in some contexts.

[0120] “Nucleoside triphosphate” or “NTP” refers to glycosylamines comprising a nucleobase, a 5-carbon sugar (e.g., ribose or deoxyribose), and a triphosphate moiety at the 5′-position. In some embodiments herein, “nucleoside triphosphate” is abbreviated as “NTP”. Non-limiting examples of nucleoside triphosphates include cytidine triphosphate (CTP), uridine triphosphate (UTP), adenosine triphosphate (ATP), guanosine triphosphate (GTP), thymidine triphosphate (TTP), and inosine triphosphate (ITP). In some embodiments, “nucleoside triphosphate” may refer to a non-natural nucleoside triphosphate. The terms “nucleoside” and “nucleotide” may be used interchangeably in some contexts.

[0121] “Modified” or “non-natural” in context of a nucleoside or nucleotide refers to a nucleoside or nucleotide that has been altered to a non-naturally occurring nucleoside or nucleotide. In some embodiments, modifications to nucleoside or nucleotides include modifications to the base, sugar moiety, and/or phosphate. In some embodiments, the common modifications of the 2′-position of the sugar moiety with fluoro (F) or —O—CH₃ is denoted by “fN” and “mN”, respectively, where N denotes the nucleobase on the nucleoside or nucleotide. In some embodiments, the presence of a 5′-thiophosphate is denoted by “*N”.

[0122] “Locked nucleoside” or “locked nucleotide” refers to nucleoside or nucleotide, respectively, in which the ribose moiety is modified with a bridge connecting the 2′ oxygen and 4′ carbon (see, e.g., Obika et al., Tetrahedron Letters, 1997, 38(50):8735-8738; Orum et al., Current Pharmaceutical Design, 2008, 14(11):1138-1142). In some embodiments, the bridge is a methylene or ethylene bridge. In some embodiments, the ribose moiety of the locked nucleoside or locked nucleotide is in the C3′-endo (beta-D) or C2′-endo (alpha-L) conformation.

[0123] “Biocatalysis,” “biocatalytic,” “biotransformation,” and “biosynthesis” refer to the use of enzymes to perform chemical reactions on organic compounds.

[0124] “Wild-type” and “naturally occurring” refer to the form found in nature. For example, a wild-type polypeptide or polynucleotide sequence is a sequence present in an organism that can be isolated from a source in nature and which has not been intentionally modified by human manipulation.

[0125] “Recombinant,” “engineered,” “variant,” “non-natural,” and “non-naturally occurring” when used with reference to a cell, nucleic acid, or polypeptide, refers to a material, or a material corresponding to the natural or native form of the material, which has been modified in a manner that would not otherwise exist in nature. In some embodiments, the cell, nucleic acid or polypeptide is identical a naturally occurring cell, nucleic acid or polypeptide, but is produced or derived from synthetic materials and/or by manipulation using recombinant techniques. Non-limiting examples include, among others, recombinant cells expressing genes that are not found within the native (non-recombinant) form of the cell or express native genes that are otherwise expressed at a different level.

[0126] “Percent (%) sequence identity” is used herein to refer to comparisons among polynucleotides or polypeptides, and are determined by comparing two optimally aligned sequences over a comparison window, wherein the portion of the polynucleotide or polypeptide sequence in the comparison window may comprise additions or deletions (i.e., gaps) as compared to the reference sequence for optimal alignment of the two sequences. The percentage may be calculated by determining the number of positions at which the identical nucleic acid base or amino acid residue occurs in both sequences to yield the number of matched positions, dividing the number of matched positions by the total number of positions in the window of comparison and multiplying the result by 100 to yield the percentage of sequence identity. Alternatively, the percentage may be calculated by determining the number of positions at which either the identical nucleic acid base or amino acid residue occurs in both sequences or a nucleic acid base or amino acid residue is aligned with a gap to yield the number of matched positions, dividing the number of matched positions by the total number of positions in the window of comparison and multiplying the result by 100 to yield the percentage of sequence identity. Those of skill in the art appreciate that there are many established algorithms available to align two sequences. Optimal alignment of sequences for comparison can be conducted by any suitable method, including, but not limited to the local homology algorithm of Smith and Waterman (Smith and Waterman, Adv. Appl. Math., 1981, 2:482), by the homology alignment algorithm of Needleman and Wunsch (Needleman and Wunsch, J. Mol. Biol., 1970, 48:443), by the search for similarity method of Pearson and Lipman (Pearson and Lipman, Proc. Natl. Acad. Sci. USA., 1988, 85:2444), by computerized implementations of these algorithms (e.g., GAP, BESTFIT, FASTA, and TFASTA in the GCG Wisconsin Software Package), or by visual inspection, as known in the art. Examples of algorithms that are suitable for determining percent sequence identity and sequence similarity include, but are not limited to the BLAST and BLAST 2.0 algorithms, which are described by Altschul et al. (See Altschul et al., J. Mol. Biol., 1990, 215: 403-410; and Altschul et al., Nucl. Acids Res., 1977, 25(17):3389-3402, respectively). Software for performing BLAST analyses is publicly available through the National Center for Biotechnology Information website. This algorithm involves first identifying high scoring sequence pairs (HSPs) by identifying short words of length W in the query sequence, which either match or satisfy some positive-valued threshold score T when aligned with a word of the same length in a database sequence. T is referred to as, the neighborhood word score threshold (See, Altschul et al., supra). These initial neighborhood word hits act as seeds for initiating searches to find longer HSPs containing them. The word hits are then extended in both directions along each sequence for as far as the cumulative alignment score can be increased. Cumulative scores are calculated using, for nucleotide sequences, the parameters M (reward score for a pair of matching residues; always >0) and N (penalty score for mismatching residues; always <0). For amino acid sequences, a scoring matrix is used to calculate the cumulative score. Extension of the word hits in each direction are halted when: the cumulative alignment score falls off by the quantity X from its maximum achieved value; the cumulative score goes to zero or below, due to the accumulation of one or more negative-scoring residue alignments; or the end of either sequence is reached. The BLAST algorithm parameters W, T, and X determine the sensitivity and speed of the alignment. The BLASTN program (for nucleotide sequences) uses as defaults a wordlength (W) of 11, an expectation (E) of 10, M=5, N=−4, and a comparison of both strands. For amino acid sequences, the BLASTP program uses as defaults a word length (W) of 3, an expectation (E) of 10, and the BLOSUM62 scoring matrix (See, Henikoff and Henikoff, Proc. Natl. Acad. Sci. USA, 1989, 89:10915). Exemplary determination of sequence alignment and % sequence identity can employ the BESTFIT or GAP programs in the GCG Wisconsin Software package (Accelrys, Madison WI), using default parameters provided.

[0127] “Substantial identity” refers to a polynucleotide or polypeptide sequence that has at least 80 percent sequence identity, at least 85 percent identity, at least between 89 to 95 percent sequence identity, or more usually, at least 99 percent sequence identity as compared to a reference sequence over a comparison window of at least 20 residue positions, frequently over a window of at least 30-50 residues, wherein the percentage of sequence identity is calculated by comparing the reference sequence to a sequence that includes deletions or additions which total 20 percent or less of the reference sequence over the window of comparison. In some specific embodiments applied to polypeptides, the term “substantial identity” means that two polypeptide sequences, when optimally aligned, such as by the programs GAP or BESTFIT using default gap weights, share at least 80 percent sequence identity, preferably at least 89 percent sequence identity, at least 95 percent sequence identity or more (e.g., 99 percent sequence identity). In some embodiments, residue positions that are not identical in sequences being compared differ by conservative amino acid substitutions.

[0128] “Reference sequence” refers to a defined sequence used as a basis for a sequence and/or activity comparison. A reference sequence may be a subset of a larger sequence, for example, a segment of a full-length gene or polypeptide sequence. Generally, a reference sequence is at least 20 nucleotide or amino acid residues in length, at least 25 residues in length, at least 50 residues in length, at least 100 residues in length or the full length of the nucleic acid or polypeptide. Since two polynucleotides or polypeptides may each (1) comprise a sequence (i.e., a portion of the complete sequence) that is similar between the two sequences, and (2) may further comprise a sequence that is divergent between the two sequences, sequence comparisons between two (or more) polynucleotides or polypeptides are typically performed by comparing sequences of the two polynucleotides or polypeptides over a “comparison window” to identify and compare local regions of sequence similarity. In some embodiments, a “reference sequence” can be based on a primary amino acid sequence, where the reference sequence is a sequence that can have one or more changes in the primary sequence.

[0129] “Comparison window” refers to a conceptual segment of contiguous nucleotide positions or amino acids residues wherein a sequence may be compared to a reference sequence. In some embodiments, the comparison window is at least 15 to 20 contiguous nucleotides or amino acids and wherein the portion of the sequence in the comparison window may comprise additions or deletions (i.e., gaps) of 20 percent or less as compared to the reference sequence (which does not comprise additions or deletions) for optimal alignment of the two sequences. In some embodiments, the comparison window can be longer than 15-20 contiguous residues, and includes, optionally 30, 40, 50, 100, or longer windows.

[0130] “Corresponding to,” “reference to,” and “relative to” when used in the context of the numbering of a given amino acid or polynucleotide sequence refer to the numbering of the residues of a specified reference sequence when the given amino acid or polynucleotide sequence is compared to the reference sequence. In other words, the residue number or residue position of a given polymer is designated with respect to the reference sequence rather than by the actual numerical position of the residue within the given amino acid or polynucleotide sequence. For example, a given amino acid sequence, such as that of an engineered adenosine kinase, can be aligned to a reference sequence by introducing gaps to optimize residue matches between the two sequences. In these cases, although the gaps are present, the numbering of the residue in the given amino acid or polynucleotide sequence is made with respect to the reference sequence to which it has been aligned.

[0131] “Amino acid difference”, “residue difference” and “substitution” refer to a difference in the amino acid residue at a position of a polypeptide sequence relative to the amino acid residue at a corresponding position in a reference sequence. The positions of amino acid differences generally are referred to herein as “Xn,” where n refers to the corresponding position in the reference sequence upon which the residue difference is based. For example, a “residue difference at position X20 as compared to SEQ ID NO: 2” refers to a difference of the amino acid residue at the polypeptide position corresponding to position 20 of SEQ ID NO: 2. Thus, if the reference polypeptide of SEQ ID NO: 2 has a leucine at position 20, then a “residue difference at position X20 as compared to SEQ ID NO: 2” refers to an amino acid substitution of any residue other than leucine at the position of the polypeptide corresponding to position 20 of SEQ ID NO: 2. In most instances herein, the specific amino acid residue difference at a position is indicated as “XnY” where “Xn” specified the corresponding position as described above, and “Y” is the single letter identifier of the amino acid found in the engineered polypeptide (i.e., the different residue than in the reference polypeptide). In some instances (e.g., in the Tables presented in the Examples), the present invention also provides specific amino acid differences denoted by the conventional notation “AnB”, where A is the single letter identifier of the residue in the reference sequence, “n” is the number of the residue position in the reference sequence, and B is the single letter identifier of the residue substitution in the sequence of the engineered polypeptide. In some instances, an amino acid residue difference or substitution may be a deletion and may be denoted by a “−”. In some instances, a polypeptide of the present invention can include one or more amino acid residue differences relative to a reference sequence, which is indicated by a list of the specified positions where residue differences are present relative to the reference sequence. In some embodiments, the amino acid difference, e.g., a substitution, is denoted by the abbreviation “nB,” without the identifier for the residue in the reference sequence. In some embodiments, the phrase “an amino acid residue nB” denotes the presence of the amino residue in the engineered polypeptide, which may or may not be a substitution in context of a reference polypeptide or amino acid sequence.

[0132] In some instances, a polypeptide of the present disclosure can include one or more amino acid residue differences relative to a reference sequence, which is indicated by a list of the specified positions where residue differences are present relative to the reference sequence. In some embodiments, where more than one amino acid can be used in a specific residue position of a polypeptide, the various amino acid residues that can be used are separated by a “/” (e.g., X20F/X20V, X20F/V, or 20F/V).

[0133] “Amino acid substitution set” or “substitution set” refers to a group of amino acid substitutions in a polypeptide sequence, as compared to a reference sequence. A substitution set can have 2, 3, 4, 5, 6, 7, 8, 9, 10, 11, 12, 13, 14, 15, or more amino acid substitutions. In some embodiments, a substitution set refers to the set of amino acid substitutions that is present in any of the variant adenosine kinases listed in the Tables provided in the Examples. In these substitution sets, the individual substitutions are separated by a semicolon (“;”; e.g., F109R;P111A) or slash (“/”; e.g., F109R/P111A or 109R/111A).

[0134] “Conservative amino acid substitution” refers to a substitution of a residue with a different residue having a similar side chain, and thus typically involves substitution of the amino acid in the polypeptide with amino acids within the same or similar defined class of amino acids. By way of example and not limitation, in some embodiments, an amino acid with an aliphatic side chain is substituted with another aliphatic amino acid (e.g., alanine, valine, leucine, and isoleucine); an amino acid with an hydroxyl side chain is substituted with another amino acid with an hydroxyl side chain (e.g., serine and threonine); an amino acids having aromatic side chains is substituted with another amino acid having an aromatic side chain (e.g., phenylalanine, tyrosine, tryptophan, and histidine); an amino acid with a basic side chain is substituted with another amino acid with a basis side chain (e.g., lysine and arginine); an amino acid with an acidic side chain is substituted with another amino acid with an acidic side chain (e.g., aspartic acid or glutamic acid); and/or a hydrophobic or hydrophilic amino acid is replaced with another hydrophobic or hydrophilic amino acid, respectively.

[0135] “Non-conservative substitution” refers to substitution of an amino acid in the polypeptide with an amino acid with significantly differing side chain properties. Non-conservative substitutions may use amino acids between, rather than within, the defined groups and affects (a) the structure of the peptide backbone in the area of the substitution (e.g., proline for glycine) (b) the charge or hydrophobicity, or (c) the bulk of the side chain. By way of example and not limitation, an exemplary non-conservative substitution can be an acidic amino acid substituted with a basic or aliphatic amino acid; an aromatic amino acid substituted with a small amino acid; and a hydrophilic amino acid substituted with a hydrophobic amino acid.

[0136] “Deletion” refers to modification to the polypeptide by removal of one or more amino acids from the reference polypeptide. Deletions can comprise removal of 1 or more amino acids, 2 or more amino acids, 5 or more amino acids, 10 or more amino acids, 15 or more amino acids, or 20 or more amino acids, up to 10% of the total number of amino acids, or up to 20% of the total number of amino acids making up the reference enzyme while retaining enzymatic activity and/or retaining the improved properties of an engineered adenosine kinase enzyme. Deletions can be directed to the internal portions and/or terminal portions of the polypeptide. In various embodiments, the deletion can comprise a continuous segment or can be discontinuous. Deletions are typically indicated by “−” in amino acid sequences.

[0137] “Insertion” refers to modification to the polypeptide by addition of one or more amino acids to the reference polypeptide. Insertions can be in the internal portions of the polypeptide, or to the carboxy or amino terminus. Insertions as used herein include fusion proteins as is known in the art. The insertion can be a contiguous segment of amino acids or separated by one or more of the amino acids in the naturally occurring polypeptide.

[0138] “Functional fragment” and “biologically active fragment” are used interchangeably herein to refer to a polypeptide that has an amino-terminal and/or carboxy-terminal deletion(s) and/or internal deletions, but where the remaining amino acid sequence is identical to the corresponding positions in the sequence to which it is being compared (e.g., a full-length engineered adenosine kinase of the present invention) and that retains substantially all of the activity of the full-length polypeptide.

[0139] “Isolated polypeptide” refers to a polypeptide which is substantially separated from other contaminants that naturally accompany it (e.g., protein, lipids, and polynucleotides). The term embraces polypeptides which have been removed or purified from their naturally occurring environment or expression system (e.g., within a host cell or via in vitro synthesis). The recombinant adenosine kinase polypeptides may be present within a cell, present in the cellular medium, or prepared in various forms, such as lysates or isolated preparations. As such, in some embodiments, the recombinant adenosine kinase polypeptides can be an isolated polypeptide.

[0140] “Substantially pure polypeptide” or “purified protein” refers to a composition in which the polypeptide species is the predominant species present (i.e., on a molar or weight basis it is more abundant than any other individual macromolecular species in the composition), and is generally a substantially purified composition when the object species comprises at least about 50 percent of the macromolecular species present by mole or % weight. However, in some embodiments, the composition comprising adenosine kinase comprises adenosine kinase that is less than 50% pure (e.g., about 10%, about 20%, about 30%, about 40%, or about 50%). Generally, a substantially pure adenosine kinase composition comprises about 60% or more, about 70% or more, about 80% or more, about 90% or more, about 95% or more, and about 98% or more of all macromolecular species by mole or % weight present in the composition. In some embodiments, the object species is purified to essential homogeneity (i.e., contaminant species cannot be detected in the composition by conventional detection methods) wherein the composition consists essentially of a single macromolecular species. Solvent species, small molecules (<500 Daltons), and elemental ion species are not considered macromolecular species. In some embodiments, the isolated recombinant adenosine kinase polypeptides are substantially pure polypeptide compositions.

[0141] “Improved enzyme property” refers to at least one improved property of an enzyme. In some embodiments, the present invention provides engineered adenosine kinase polypeptides that exhibit an improvement in any enzyme property as compared to a reference adenosine kinase polypeptide and/or a wild-type adenosine kinase polypeptide, and/or another engineered adenosine kinase polypeptide. Thus, the level of “improvement” can be determined and compared between various adenosine kinase polypeptides, including wild-type, as well as engineered adenosine kinases. Improved properties include, but are not limited, to such properties as increased protein expression, increased thermoactivity, increased thermostability, increased pH activity, increased stability, increased enzymatic activity, increased substrate specificity or affinity, increased specific activity, increased resistance to substrate or end-product inhibition, increased chemical stability, improved chemoselectivity, improved solvent stability, increased tolerance to acidic pH, increased tolerance to proteolytic activity (i.e., reduced sensitivity to proteolysis), reduced aggregation, increased solubility, and altered temperature profile. In additional embodiments, the term is used in reference to the at least one improved property of adenosine kinase enzymes. In some embodiments, the present invention provides adenosine kinase polypeptides that exhibit an improvement in any enzyme property as compared to a reference adenosine kinase polypeptide and/or a wild-type adenosine kinase polypeptide, and/or another engineered adenosine kinase polypeptide. Thus, the level of “improvement” can be determined and compared between various adenosine kinase polypeptides, including wild-type, as well as engineered adenosine kinases.

[0142] “Increased enzymatic activity” and “enhanced catalytic activity” refer to an improved property of the engineered polypeptides, which can be represented by an increase in specific activity (e.g., product produced/time/weight protein) or an increase in percent conversion of the substrate to the product (e.g., percent conversion of starting amount of substrate to product in a specified time period using a specified amount of enzyme) as compared to the reference enzyme. In some embodiments, the terms refer to an improved property of engineered adenosine kinase polypeptides provided herein, which can be represented by an increase in specific activity (e.g., product produced/time/weight protein) or an increase in percent conversion of the substrate to the product (e.g., percent conversion of starting amount of substrate to product in a specified time period using a specified amount of adenosine kinase) as compared to the reference adenosine kinase enzyme. In some embodiments, the terms are used in reference to improved adenosine kinase enzymes provided herein. Exemplary methods to determine enzyme activity of the engineered adenosine kinases of the present invention are provided in the Examples. Any property relating to enzyme activity may be affected, including the classical enzyme properties of Kₘ, Vₘₐₓ or k_{cat}, changes of which can lead to increased enzymatic activity. For example, improvements in enzyme activity can be from about 1.1 fold the enzymatic activity of the corresponding wild-type enzyme, to as much as 2-fold, 5-fold, 10-fold, 20-fold, 25-fold, 50-fold, 75-fold, 100-fold, 150-fold, 200-fold or more enzymatic activity than the naturally occurring adenosine kinase or another engineered adenosine kinase from which the adenosine kinase polypeptides were derived.

[0143] “Conversion” refers to the enzymatic conversion (or biotransformation) of a substrate(s) to the corresponding product(s). “Percent conversion” refers to the percent of the substrate that is converted to the product within a period of time under specified conditions. Thus, the “enzymatic activity” or “activity” of an adenosine kinase polypeptide can be expressed as “percent conversion” of the substrate to the product in a specific period of time.

[0144] “Stringent hybridization conditions” is used herein to refer to conditions under which nucleic acid hybrids are stable. As known to those of skill in the art, the stability of hybrids is reflected in the melting temperature (Tₘ) of the hybrids. In general, the stability of a hybrid is a function of ion strength, temperature, G/C content, and the presence of chaotropic agents. The Tₘ values for polynucleotides can be calculated using known methods for predicting melting temperatures (See e.g., Baldino et al., Meth. Enzymol., 1989, 168:761-777; Bolton et al., Proc. Natl. Acad. Sci. USA., 1962, 48:1390; Bresslauer et al., Proc. Natl. Acad. Sci. USA, 1986, 83:8893-8897; Freier et al., Proc. Natl. Acad. Sci. USA., 1986, 83:9373-9377; Kierzek et al., Biochem., 1986, 25:7840-7846; Rychlik et al., Nucl. Acids Res., 1990, 18:6409-6412 (erratum, Nucl. Acids Res., 1991, 19:698); Sambrook et al., Molecular Cloning: A Laboratory Manual, Cold Spring Harbor Laboratory Press, New York, (2001); Suggs et al., in “Developmental Biology Using Purified Genes,” Brown et al. [eds.], pp. 683-693, Academic Press, Cambridge, MA (1981); and Wetmur, Crit. Rev. Biochem. Mol. Biol., 1991, 26:227-259). In some embodiments, the polynucleotide encodes the polypeptide disclosed herein and hybridizes under defined conditions, such as moderately stringent or highly stringent conditions, to the complement of a sequence encoding an engineered adenosine kinase enzyme of the present invention.

[0145] “Hybridization stringency” relates to hybridization conditions, such as washing conditions, in the hybridization of nucleic acids. Generally, hybridization reactions are performed under conditions of lower stringency, followed by washes of varying but higher stringency (see, e.g., Sambrook et al., Molecular Cloning: A Laboratory Manual, Cold Spring Harbor Laboratory Press, New York, (2001); Ausubel et al., Current Protocols in Molecular Biology, John Wiley & Sons, 2003). The term “moderately stringent hybridization” refers to conditions that permit target-DNA to bind a complementary nucleic acid that has about 60% identity, preferably about 75% identity, about 85% identity to the target DNA, with greater than about 90% identity to target-polynucleotide. Exemplary moderately stringent conditions are conditions equivalent to hybridization in 50% formamide, 5×Denhart's solution, 5×SSPE, 0.2% SDS at 42° C., followed by washing in 0.2×SSPE, 0.2% SDS, at 42° C. “High stringency hybridization” refers generally to conditions that are about 10° C. or less from the thermal melting temperature T, as determined under the solution condition for a defined polynucleotide sequence. In some embodiments, a high stringency condition refers to conditions that permit hybridization of only those nucleic acid sequences that form stable hybrids in 0.018M NaCl at 65° C. (i.e., if a hybrid is not stable in 0.018M NaCl at 65° C., it will not be stable under high stringency conditions, as contemplated herein). High stringency conditions can be provided, for example, by hybridization in conditions equivalent to 50% formamide, 5×Denhart's solution, 5×SSPE, 0.2% SDS at 42° C., followed by washing in 0.1×SSPE, and 0.1% SDS at 65° C. Another high stringency condition is hybridizing in conditions equivalent to hybridizing in 5×SSC containing 0.1% (w/v) SDS at 65° C. and washing in 0.1×SSC containing 0.1% SDS at 65° C. Other high stringency hybridization conditions, as well as moderately stringent conditions, are described in the references cited above.

[0146] “Coding sequence” refers to that portion of a nucleic acid (e.g., a gene) that encodes an amino acid sequence of a protein.

[0147] “Codon optimized” refers to changes in the codons of the polynucleotide encoding a protein to those preferentially used in a particular organism such that the encoded protein is efficiently expressed in the organism of interest. Although the genetic code is degenerate in that most amino acids are represented by several codons, called “synonyms” or “synonymous” codons, it is well known that codon usage by particular organisms is nonrandom and biased towards particular codon triplets. This codon usage bias may be higher in reference to a given gene, genes of common function or ancestral origin, highly expressed proteins versus low copy number proteins, and the aggregate protein coding regions of an organism's genome. In some embodiments, the polynucleotides encoding the adenosine kinase enzymes may be codon optimized for optimal production in the host organism selected for expression.

[0148] “Preferred,” “optimal,” and “high codon usage bias” codons when used alone or in combination refer(s) interchangeably to codons that are used at higher frequency in the protein coding regions than other codons that code for the same amino acid. The preferred codons may be determined in relation to codon usage in a single gene, a set of genes of common function or origin, highly expressed genes, the codon frequency in the aggregate protein coding regions of the whole organism, codon frequency in the aggregate protein coding regions of related organisms, or combinations thereof. Codons whose frequency increases with the level of gene expression are typically optimal codons for expression. A variety of methods are known for determining the codon frequency (e.g., codon usage, relative synonymous codon usage) and codon preference in specific organisms, including multivariate analysis, for example, using cluster analysis or correspondence analysis, and the effective number of codons used in a gene (See e.g., GCG CodonPreference, Genetics Computer Group Wisconsin Package; CodonW, Peden, University of Nottingham; McInerney, Bioinform., 1998, 14:372-73; Stenico et al., Nucl. Acids Res., 1994, 222437-46; and Wright, Gene, 1990, 87:23-29). Codon usage tables are available for many different organisms (See e.g., Wada et al., Nucl. Acids Res., 1992, 20:2111-2118; Nakamura et al., Nucl. Acids Res., 2000, 28:292; Duret, et al., supra; Henaut and Danchin, in Escherichia coli and Salmonella, Neidhardt, et al. (eds.), ASM Press, Washington D.C., p. 2047-2066 (1996)). The data source for obtaining codon usage may rely on any available nucleotide sequence capable of coding for a protein. These data sets include nucleic acid sequences actually known to encode expressed proteins (e.g., complete protein coding sequences-CDS), expressed sequence tags (ESTS), or predicted coding regions of genomic sequences (See e.g., Mount, Bioinformatics: Sequence and Genome Analysis, Chapter 8, Cold Spring Harbor Laboratory Press, Cold Spring Harbor, N.Y. (2001); Uberbacher, Meth. Enzymol., 1996, 266:259-281; and Tiwari et al., Comput. Appl. Biosci., 1997, 13:263-270).

[0149] “Control sequence” refers herein to include all components, which are necessary or advantageous for the expression of a polynucleotide and/or polypeptide of the present application.

[0150] Each control sequence may be native or foreign to the nucleic acid sequence encoding the polypeptide. Such control sequences include, but are not limited to, a leader, polyadenylation sequence, pro-peptide sequence, promoter sequence, signal peptide sequence, initiation sequence and transcription terminator. In some embodiments, the control sequences include a promoter, and transcriptional and translational stop signals.

[0151] “Operably linked” or “operatively linked” is defined herein as a configuration in which a control sequence is appropriately placed (i.e., in a functional relationship) at a position relative to a polynucleotide of interest such that the control sequence directs or regulates the expression of the polynucleotide, and where appropriate the encoded polypeptide of interest.

[0152] “Promoter sequence” refers to a nucleic acid sequence that defines and/or initiates expression of a polynucleotide of interest, such as a coding sequence. The promoter sequence contains transcriptional control sequences, which mediate the expression of a polynucleotide of interest. The promoter may be any nucleic acid sequence which shows transcriptional activity in the host cell of choice including mutant, truncated, and hybrid promoters, and may be obtained from genes encoding extracellular or intracellular polypeptides either homologous or heterologous to the host cell.

[0153] “Heterologous” refers to the relationship between two or more nucleic acid or protein sequences (e.g., a promoter sequence, signal peptide, terminator sequence, etc.) that are derived from different sources and are not associated in nature.

[0154] “Vector” refers to a polynucleotide construct for introducing a polynucleotide sequence into a cell. In some embodiments, the vector is an expression vector that is operably linked to a suitable control sequence capable of effecting the expression in a suitable host of the polynucleotide of interest and where appropriate the encoded polypeptide.

[0155] “Expression” includes any step involved in the production of the polypeptide including, but not limited to, transcription, post-transcriptional modification, translation, and post-translational modification. In some embodiments, the term also encompasses secretion of the polypeptide from a cell.

[0156] “Produces” refers to the production of proteins and/or other compounds by cells. It is intended that the term encompass any step involved in the production of polypeptides including, but not limited to, transcription, post-transcriptional modification, translation, and post-translational modification. In some embodiments, the term also encompasses secretion of the polypeptide from a cell.

[0157] “Culturing” refers to the growing of a population of microbial cells under any suitable conditions (e.g., using a liquid, gel or solid medium).

[0158] “Host cell” and “host strain” refer to suitable hosts for expression vectors comprising DNA provided herein (e.g., the polynucleotides encoding the adenosine kinase variants). In some embodiments, the host cells are prokaryotic or eukaryotic cells that have been transformed or transfected with vectors constructed using recombinant DNA techniques as known in the art. [0157]“pH stable” refers to an adenosine kinase polypeptide that maintains similar activity (e.g., more than 60% to 80%) after exposure to high or low pH (e.g., 4.5-6 or 8 to 12) for a period of time (e.g., 0.5-24 hr) compared to the untreated enzyme.

[0159] “Thermostable” refers to an adenosine kinase polypeptide that maintains similar activity (more than 60% to 80% for example) after exposure to elevated temperatures (e.g., 40-80° C.) for a period of time (e.g., 0.5-24 h) compared to the wild-type enzyme exposed to the same elevated temperature.

[0160] “Solvent stable” refers to an adenosine kinase polypeptide that maintains similar activity (more than e.g., 60% to 80%) after exposure to varying concentrations (e.g., 5-99%) of solvent (ethanol, isopropyl alcohol, dimethylsulfoxide [DMSO], tetrahydrofuran, 2-methyltetrahydrofuran, acetone, toluene, butyl adenosine, methyl tert-butyl ether, etc.) for a period of time (e.g., 0.5-24 h) compared to the wild-type enzyme exposed to the same concentration of the same solvent.

[0161] “Thermo- and solvent stable” refers to an adenosine kinase polypeptide that is both thermostable and solvent stable.

[0162] “Stereoselectivity” refers to the preferential formation in a chemical or enzymatic reaction of one stereoisomer over another. Stereoselectivity can be partial, where the formation of one stereoisomer is favored over the other, or it may be complete where only one stereoisomer is formed. When the stereoisomers are enantiomers, the stereoselectivity is referred to as enantioselectivity, the fraction (typically reported as a percentage) of one enantiomer in the sum of both. It is commonly alternatively reported in the art (typically as a percentage) as the enantiomeric excess (“e.e.”) calculated therefrom according to the formula [major enantiomer−minor enantiomer]/[major enantiomer+minor enantiomer]. Where the stereoisomers are diastereoisomers, the stereoselectivity is referred to as diastereoselectivity, the fraction (typically reported as a percentage) of one diastereomer in a mixture of two diastereomers, commonly alternatively reported as the diastereomeric excess (“d.e.”). Enantiomeric excess and diastereomeric excess are types of stereomeric excess.

[0163] “Regioselectivity” and “regioselective reaction” refer to a reaction in which one direction of bond making or breaking occurs preferentially over all other possible directions. Reactions can completely (100%) regioselective if the discrimination is complete, substantially regioselective (at least 75%), or partially regioselective (x %, wherein the percentage is set dependent upon the reaction of interest), if the product of reaction at one site predominates over the product of reaction at other sites.

[0164] “Chemoselectivity” refers to the preferential formation in a chemical or enzymatic reaction of one product over another.

[0165] “Suitable reaction conditions” refers to those conditions in the enzymatic conversion reaction solution (e.g., ranges of enzyme loading, substrate loading, temperature, pH, buffers, co-solvents, etc.) under which an adenosine kinase polypeptide of the present invention is capable of converting a substrate to the desired product compound. Some exemplary “suitable reaction conditions” are provided herein.

[0166] “Loading,” such as in “compound loading” or “enzyme loading” refers to the concentration or amount of a component in a reaction mixture at the start of the reaction.

[0167] “Substrate” in the context of an enzymatic conversion reaction process refers to the compound or molecule acted on by the engineered enzymes provided herein (e.g., engineered adenosine kinase polypeptides).

[0168] “Product” in the context of an enzymatic conversion process refers to the compound or molecule resulting from the action of an enzymatic polypeptide on a substrate.

[0169] “Increasing” yield of a product (e.g., a nucleoside triphosphate or analogue) from a reaction occurs when a particular component present during the reaction (e.g., an adenosine kinase enzyme) causes more product to be produced, compared with a reaction conducted under the same conditions with the same substrate and other substituents, but in the absence of the component of interest.

[0170] “Substantially free” of a particular enzyme if the amount of that enzyme compared with other enzymes that participate in catalyzing the reaction is less than about 2%, about 1%, or about 0.1% (wt/wt).

[0171] “Fractionating” a liquid (e.g., a culture broth) means applying a separation process (e.g., salt precipitation, column chromatography, size exclusion, and filtration) or a combination of such processes to provide a solution in which a desired protein comprises a greater percentage of total protein in the solution than in the initial liquid product.

[0172] “Alkyl” refers to saturated hydrocarbon groups of from 1 to 18 carbon atoms inclusively, either straight chained or branched, more preferably from 1 to 8 carbon atoms inclusively, and preferably 1 to 6 carbon atoms inclusively. An alkyl with a specified number of carbon atoms is denoted in parenthesis (e.g., (C₁-C₄)alkyl refers to an alkyl of 1 to 4 carbon atoms).

[0173] “Alkenyl” refers to groups of from 2 to 12 carbon atoms inclusively, either straight or branched containing at least one double bond but optionally containing more than one double bond.

[0174] “Alkynyl” refers to groups of from 2 to 12 carbon atoms inclusively, either straight or branched containing at least one triple bond but optionally containing more than one triple bond, and additionally optionally containing one or more double bonded moieties.

[0175] “Heteroalkyl, “heteroalkenyl,” and heteroalkynyl,” refer to alkyl, alkenyl and alkynyl as defined herein in which one or more of the carbon atoms are each independently replaced with the same or different heteroatoms or heteroatomic groups. Heteroatoms and/or heteroatomic groups which can replace the carbon atoms include, but are not limited to, —O—, —S—, —S—O—, —NR′—, —PH—, —S(O)—, —S(O)2-, —S(O) NR′—, —S(O)₂NR′—, and the like, including combinations thereof, where each Ra is independently selected from hydrogen, alkyl, heteroalkyl, cycloalkyl, heterocycloalkyl, aryl, and heteroaryl.

[0176] “Alkoxy” refers to the group —OR′ wherein R′ is an alkyl group is as defined above including optionally substituted alkyl groups as also defined herein.

[0177] “Amino” refers to the group —NH₁. Substituted amino refers to the group —NHR′, NR′R′, and NR′R′R′, where each R′ is independently selected from substituted or unsubstituted alkyl, cycloalkyl, cycloheteroalkyl, alkoxy, aryl, heteroaryl, heteroarylalkyl, acyl, alkoxycarbonyl, sulfanyl, sulfinyl, sulfonyl, and the like. Typical amino groups include, but are limited to, dimethylamino, diethylamino, trimethylammonium, triethylammonium, methylysulfonylamino, furanyl-oxy-sulfamino, and the like.

[0178] “Oxo” refers to ═O.

[0179] “Oxy” refers to a divalent group —O—, which may have various substituents to form different oxy groups, including ethers and esters.

[0180] “Carboxy” refers to —COOH.

[0181] “Carbonyl” refers to —C(O)—, which may have a variety of substituents to form different carbonyl groups including acids, acid halides, aldehydes, amides, esters, and ketones.

[0182] “Alkyloxycarbonyl” refers to —C(O)OR′, where R′ is an alkyl group as defined herein, which can be optionally substituted.

[0183] As used herein, “aminocarbonyl” refers to —C(O)NH₂. Substituted aminocarbonyl refers to —C(O)NR′R′, where the amino group NR′R′ is as defined herein.

[0184] “Halogen” and “halo” refer to fluoro (F), chloro (C), bromo (B), and iodo (I).

[0185] “Hydroxy” refers to —OH.

[0186] “Cyano” refers to —CN.

[0187] “Aryl” refers to an unsaturated aromatic carbocyclic group of from 6 to 12 carbon atoms inclusively having a single ring (e.g., phenyl) or multiple condensed rings (e.g., naphthyl or anthryl). Exemplary aryls include phenyl, pyridyl, naphthyl and the like.

[0188] “Heterocycle,” “heterocyclic,” and interchangeably “heterocycloalkyl,” refer to a saturated or unsaturated group having a single ring or multiple condensed rings, from 2 to 10 carbon ring atoms inclusively and from 1 to 4 hetero ring atoms inclusively selected from nitrogen, sulfur or oxygen within the ring. Such heterocyclic groups can have a single ring (e.g., piperidinyl or tetrahydrofuryl) or multiple condensed rings (e.g., indolinyl, dihydrobenzofuran or quinuclidinyl). Examples of heterocycles include, but are not limited to, furan, thiophene, thiazole, oxazole, pyrrole, imidazole, pyrazole, pyridine, pyrazine, pyrimidine, pyridazine, indolizine, isoindole, indole, indazole, purine, quinolizine, isoquinoline, quinoline, phthalazine, naphthylpyridine, quinoxaline, quinazoline, cinnoline, pteridine, carbazole, carboline, phenanthridine, acridine, phenanthroline, isothiazole, phenazine, isoxazole, phenoxazine, phenothiazine, imidazolidine, imidazoline, piperidine, piperazine, pyrrolidine, indoline and the like.

[0189] “Heteroaryl” refers to an aromatic heterocyclic group of from 1 to 10 carbon atoms inclusively and 1 to 4 heteroatoms inclusively selected from oxygen, nitrogen and sulfur within the ring. Such heteroaryl groups can have a single ring (e.g., pyridyl or furyl) or multiple condensed rings (e.g., indolizinyl or benzothienyl).

[0190] “Heteroarylalkyl” refers to an alkyl substituted with a heteroaryl (i.e., heteroaryl-alkyl-groups), preferably having from 1 to 6 carbon atoms inclusively in the alkyl moiety and from 5 to 12 ring atoms inclusively in the heteroaryl moiety. Such heteroarylalkyl groups are exemplified by pyridylmethyl and the like.

[0191] “Heteroarylalkenyl” refers to an alkenyl substituted with a heteroaryl (i.e., heteroaryl-alkenyl-groups), preferably having from 2 to 6 carbon atoms inclusively in the alkenyl moiety and from 5 to 12 ring atoms inclusively in the heteroaryl moiety.

[0192] “Heteroarylalkynyl” refers to an alkynyl substituted with a heteroaryl (i.e., heteroaryl-alkynyl-groups), preferably having from 2 to 6 carbon atoms inclusively in the alkynyl moiety and from 5 to 12 ring atoms inclusively in the heteroaryl moiety.

[0193] “Membered ring” is meant to embrace any cyclic structure. The number preceding the term “membered” denotes the number of skeletal atoms that constitute the ring. Thus, for example, cyclohexyl, pyridine, pyran and thiopyran are 6-membered rings and cyclopentyl, pyrrole, furan, and thiophene are 5-membered rings.

[0194] “Phosphate” as used herein refers to a functional group comprised of an orthophosphate ion (phosphorous atom covalently linked to four oxygen atoms). The orthophosphate ion is commonly found with one or more hydrogen atoms or organic groups. A phosphate group or chain may be modified, as further described herein.

[0195] “Phosphorylated” as used herein refers to the addition or presence of one of more phosphoryl groups (phosphorous atom covalently linked to the three oxygen atoms).

[0196] “Thiophosphate” refers to an instance where a non-bridging oxygen in a phosphate group of a phosphodiester bond, NMP, NDP, NTP or NQP is replaced with a sulfur. In some embodiments, nucleoside 5′-thiomonophosphate is referred to as NMP-S. In some embodiments, nucleoside-5′-1-thio(diphosphate) and nucleoside-5′-1-thio(triphosphate) are referred to as NDPαS and NTPαS, respectively. In some embodiments, nucleoside-5′-2-thio(diphosphate) and nucleoside-5′-2-thio(triphosphate) are referred to as NDPβS and NTPβS, respectively.

[0197] “Dithiophosphate” refers to an instance where two non-bridging oxygens in a phosphate group of a phosphodiester bond, NMP, NDP, NTP or NQP are replaced with two sulfurs.

[0198] Unless otherwise specified, positions occupied by hydrogen in the foregoing groups can be further substituted with substituents exemplified by, but not limited to, hydroxy, oxo, nitro, methoxy, ethoxy, alkoxy, substituted alkoxy, trifluoromethoxy, haloalkoxy, fluoro, chloro, bromo, iodo, halo, methyl, ethyl, propyl, butyl, alkyl, alkenyl, alkynyl, substituted alkyl, trifluoromethyl, haloalkyl, hydroxyalkyl, alkoxyalkyl, thio, alkylthio, acyl, carboxy, alkoxycarbonyl, carboxamido, substituted carboxamido, alkylsulfonyl, alkylsulfinyl, alkylsulfonylamino, sulfonamido, substituted sulfonamido, cyano, amino, substituted amino, alkylamino, dialkylamino, aminoalkyl, acylamino, amidino, amidoximo, hydroxamoyl, phenyl, aryl, substituted aryl, aryloxy, arylalkyl, arylalkenyl, arylalkynyl, pyridyl, imidazolyl, heteroaryl, substituted heteroaryl, heteroaryloxy, heteroarylalkyl, heteroarylalkenyl, heteroarylalkynyl, cyclopropyl, cyclobutyl, cyclopentyl, cyclohexyl, cycloalkyl, cycloalkenyl, cycloalkylalkyl, substituted cycloalkyl, cycloalkyloxy, pyrrolidinyl, piperidinyl, morpholino, heterocycle, (heterocycle)oxy, and (heterocycle)alkyl; and preferred heteroatoms are oxygen, nitrogen, and sulfur. It is understood that where open valences exist on these substituents they can be further substituted with alkyl, cycloalkyl, aryl, heteroaryl, and/or heterocycle groups, that where these open valences exist on carbon they can be further substituted by halogen and by oxygen-, nitrogen-, or sulfur-bonded substituents, and where multiple such open valences exist, these groups can be joined to form a ring, either by direct formation of a bond or by formation of bonds to a new heteroatom, preferably oxygen, nitrogen, or sulfur. It is further understood that the above substitutions can be made provided that replacing the hydrogen with the substituent does not introduce unacceptable instability to the molecules of the present invention, and is otherwise chemically reasonable.

[0199] “Optional” and “optionally” mean that the subsequently described event or circumstance may or may not occur, and that the description includes instances where the event or circumstance occurs and instances in which it does not. One of ordinary skill in the art would understand that with respect to any molecule described as containing one or more optional substituents, only sterically practical and/or synthetically feasible compounds are meant to be included.

[0200] “Optionally substituted” refers to all subsequent modifiers in a term or series of chemical groups. For example, in the term “optionally substituted arylalkyl, the “alkyl” portion and the “aryl” portion of the molecule may or may not be substituted, and for the series “optionally substituted alkyl, cycloalkyl, aryl and heteroaryl,” the alkyl, cycloalkyl, aryl, and heteroaryl groups, independently of the others, may or may not be substituted.

### Engineered Adenosine Kinase Polypeptides

[0201] In one aspect, the present disclosure provides adenosine kinase enzymes engineered to have improved properties compared to the parent adenosine kinase enzyme. In some embodiments, the engineered adenosine kinase enzymes exhibit increased activity on nucleoside substrates, increased thermostability, and/or increased activity on modified nucleoside substrates. The engineered adenosine kinases are useful in the conversion of nucleosides to their corresponding nucleoside monophosphate products, particularly in enzyme cascade systems.

[0202] In some embodiments, the engineered adenosine kinase comprises an amino acid sequence having at least 70%, 75%, 80%, 81%, 82%, 83%, 84%, 85%, 86%, 87%, 88%, 89%, 90%, 91%, 92%, 93%, 94%, 95%, 96%, 97%, 98%, 99%, or more sequence identity to a reference sequence corresponding to amino acid residues 12-321 of an even-numbered SEQ ID NO. of SEQ ID NOs: 2-1142, 1194-1808 and 1818-2124, or to a reference sequence corresponding to an even-numbered SEQ ID NO. of SEQ ID NOs: 2-1142, 1194-1808 and 1818-2124, wherein the amino acid sequence comprises one or more substitutions relative to the reference sequence corresponding to amino acid residues 12-321 of SEQ ID NO: 2, 90, 254, 370, 734, 896, 1196, 1366, 1382, 1464, 1568, 1616, 1668, 1766, 1826, 1918, or 1942, or relative to the reference sequence corresponding to SEQ ID NO: 2, 90, 254, 370, 734, 896, 1196, 1366, 1382, 1464, 1568, 1616, 1668, 1766, 1826, 1918, or 1942.

[0203] In some embodiments, an engineered adenosine kinase comprises an amino acid sequence having at least 70%, 75%, 80%, 81%, 82%, 83%, 84%, 85%, 86%, 87%, 88%, 89%, 90%, 91%, 92%, 93%, 94%, 95%, 96%, 97%, 98%, 99%, or more sequence identity to a reference sequence corresponding to amino acid residues 12-321 of SEQ ID NO: 2, 90, 254, 370, 734, 896, 1196, 1366, 1382, 1464, 1568, 1616, 1668, 1766, 1826, 1918, or 1942, or to a reference sequence corresponding to SEQ ID NO: 2, 90, 254, 370, 734, 896, 1196, 1366, 1382, 1464, 1568, 1616, 1668, 1766, 1826, 1918, or 1942, wherein the amino acid sequence comprises one or more substitutions relative to the reference sequence corresponding to amino acid residues 12-321 of SEQ ID NO: 2, 90, 254, 370, 734, 896, 1196, 1366, 1382, 1464, 1568, 1616, 1668, 1766, 1826, 1918, or 1942, or relative to the reference sequence corresponding to SEQ ID NO: 2, 90, 254, 370, 734, 896, 1196, 1366, 1382, 1464, 1568, 1616, 1668, 1766, 1826, 1918, or 1942.

[0204] In some embodiments, the engineered adenosine kinase comprises an amino acid sequence having at least 70%, 75%, 80%, 81%, 82%, 83%, 84%, 85%, 86%, 87%, 88%, 89%, 90%, 91%, 92%, 93%, 94%, 95%, 96%, 97%, 98%, 99%, or more sequence identity to the reference sequence corresponding to amino acid residues 12-321 of SEQ ID NO: 2, or to the reference sequence corresponding to SEQ ID NO: 2, wherein the amino acid sequence comprises one or more substitutions relative to the reference sequence corresponding to amino acid residues 12-321 of SEQ ID NO: 2, or relative to the reference sequence corresponding to SEQ ID NO: 2.

[0205] In some embodiments, the engineered adenosine kinase comprises an amino acid sequence having at least 70%, 75%, 80%, 81%, 82%, 83%, 84%, 85%, 86%, 87%, 88%, 89%, 90%, 91%, 92%, 93%, 94%, 95%, 96%, 97%, 98%, 99%, or more sequence identity to the reference sequence corresponding to amino acid residues 12-321 of SEQ ID NO: 90, 254, 370, 734, 896, 1196, 1366, 1382, 1464, 1568, 1616, 1668, 1766, 1826, 1918, or 1942, or to the reference sequence corresponding to SEQ ID NO: 90, 254, 370, 734, 896, 1196, 1366, 1382, 1464, 1568, 1616, 1668, 1766, 1826, 1918, or 1942, wherein the amino acid sequence comprises one or more substitutions relative to the reference sequence corresponding to amino acid residues 12-321 of SEQ ID NO: 2, or relative to the reference sequence corresponding to SEQ ID NO: 2.

[0206] In some embodiments, the engineered adenosine kinase comprises an amino acid sequence having at least 70%, 75%, 80%, 81%, 82%, 83%, 84%, 85%, 86%, 87%, 88%, 89%, 90%, 91%, 92%, 93%, 94%, 95%, 96%, 97%, 98%, 99%, or more sequence identity to a reference sequence corresponding to amino acid residues 12-321 of an even-numbered SEQ ID NO. of SEQ ID NOs: 4-1142, 1194-1808 and 1818-2124, or to a reference sequence corresponding to an even-numbered SEQ ID NO. of SEQ ID NOs: 4-1142, 1194-1808 and 1818-2124, wherein the amino acid sequence comprises one or more substitutions relative to the reference sequence corresponding to amino acid residues 12-321 of SEQ ID NO: 2, or relative to the reference sequence corresponding to SEQ ID NO: 2.

[0207] In some embodiments, the amino acid sequence of the engineered adenosine kinase comprises at least a substitution at amino acid position 13, 14, 20, 21, 23, 24, 26, 27, 28, 29, 30, 31, 33, 34, 35, 38, 40, 41, 42, 43, 46, 49, 50, 51, 52, 53, 54, 55, 56, 64, 67, 73, 74, 77, 79, 80, 83, 86, 87, 89, 90, 91, 92, 93, 94, 100, 101, 102, 103, 104, 106, 107, 108, 109, 111, 112, 113, 116, 119, 120, 121, 126, 128, 129, 130, 133, 134, 136, 141, 144, 146, 147, 151, 152, 155, 156, 157, 160, 162, 163, 164, 167, 168, 169, 170, 171, 172, 177, 179, 180, 181, 182, 183, 185, 187, 188, 190, 191, 192, 194, 195, 196, 197, 202, 206, 207, 208, 210, 211, 212, 215, 216, 217, 218, 221, 222, 225, 229, 231, 232, 233, 234, 236, 237, 238, 239, 240, 241, 242, 243, 244, 245, 246, 247, 248, 249, 250, 251, 252, 253, 254, 255, 256, 258, 265, 271, 274, 275, 276, 287, 288, 291, 292, 293, 294, 295, 296, 299, 303, 305, 307, 308, 310, 311, 312, 314, 315, 316, 317, or 320, or combinations thereof, wherein the amino acid positions are relative to the reference sequence corresponding to amino acid residues 12-321 of SEQ ID NO: 2, or relative to the reference sequence corresponding to SEQ ID NO: 2.

[0208] In some embodiments, the amino acid sequence of the engineered adenosine kinase comprises at least a substitution, or amino acid residue 13A/E/P, 14S/T/V, 20F/V, 21G, 23N, 241/N/V, 26F, 27A/C/G/K/P/R/S/W, 28L/M, 29G/R, 30G/Y, 31F/H/L/R/W/Y, 33A/P/Q/S, 34C/G/K/R, 35D/E/S/V/Y, 38C/R/V, 40H/M/R/W, 41L, 42D/G/N/Q, 43E/K/R/S/V, 46I, 49M, 50C, 51F/G/S, 52C/D/F/G/S/T, 53L/R, 54V, 55H, 56F/G/S/Y, 64M/T, 67G, 73A/C/E/M, 74F/I/K/R/T/V, 77V, 79A, 80M/S/V, 83F/L/S/T/V, 86L/Q, 87K, 89G/K/L/T, 90L/R/S/T/V, 91Y, 92M, 93A, 94M/N, 100G, 101F/W, 102I, 103L/Q/R, 104A/C/D/G/L/N/P/R/S/T/W/Y, 106E/G/L/M/P/R/T, 107A/G/H/S/T, 108A/C/E, 109E/G/L/P/R/S/T, 111A/G/L, 112I/L, 113G/S, 116M, 119C/G/M/Q/R/S/T/V, 120C, 121F/H/L/M/Q, 126L/S, 128F/V/W, 129A/G/S, 130A, 133A/L, 134H, 136F/H, 141S, 144Q/S, 146C/I, 147A/N/S, 151L, 152A/C, 155A/I/N/T/V/W, 156Y, 157P, 160L, 162F, 163G, 164A/G/K/Q/S/W, 167F/T/V/W, 168R/V, 169A/C/D/I/L/M/S, 170D/H/K/M/R/S/V, 171C/V, 172S, 177V, 179N, 180Q, 181A/C/L/V, 182G, 183M/S/V, 185S/T, 187H/Q/S/V, 188T, 190I, 191A/R/S/W, 192L, 194A/R, 195G/M/T/V, 196S, 197R, 202F, 206A/H, 207A/L/M/R/T/V, 211A/C/F/H/I/K/L/M/R/T/W, 212A, 215L, 216V, 217A/V, 218D/L/N/R/V, 221A, 222A/G/M/Q, 225E/G, 229C/H/V, 231L/M/V, 232S, 233A/S/V, 234A/M/N/R/V/Y, 236C/S/V, 237K/I/L/M/Q/V, 238L, 239A/F/G/H/I/M/Q/R/T/W, 240L/V, 241R, 242D/T, 243F/G/R/Y, 244R/W, 245F/Q/W, 246A/R/S/T/V, 247L, 248E/G/K/L/R/V, 249A/G/I/L/M/R/S, 250H/I/M/T, 251K/L/T/V, 252A/C/G/K/T/V, 253D/E/G/H/K/L/P/S/T/V, 254I/L/M/P/Q/T, 255A/C/E/G/I/K/S/W, 256C/H/M, 258R/S/V, 265Y, 271W, 274R, 275S, 276D/E/G/S, 287A/S/V/Y, 288V, 291G, 292F/I/K/V, 293M, 294L, 295A, 296N, 299G/S, 303D/F/H/M/S/V/W, 305S/T, 307F/G, 308D/F/L/V, 310A/C, 311E/F/G/L/M/Q/R/S/T, 312R, 314Q/S/V, 315S, 316A/D/E/I/K/S/Y, 317M/W/Y, or 320G/R/S, or combinations thereof, wherein the amino acid positions are relative to the reference sequence corresponding to amino acid residues 12-321 of SEQ ID NO: 2, or relative to the reference sequence corresponding to SEQ ID NO: 2.

[0209] In some embodiments, the amino acid sequence of the engineered adenosine kinase comprises at least a substitution S13A/E/P, A14S/T/V, L20F/V, A21G, D23N, T241/N/V, M26F, V27A/C/G/K/P/R/S/W, F28L/M, P29G/R, D30G/Y, Q31F/H/L/R/W/Y, K33A/P/Q/S, N34C/G/K/R, H35D/E/S/V/Y, P38C/R/V, K40H/M/R/W, V41L, H42D/G/N/Q, I43E/K/R/S/V, V46I, L49M, V50C, P51F/G/S, R52C/D/F/G/S/T, M53L/R, R54V, R55H, E56F/G/S/Y, I64M/T, N67G, G73A/C/E/M, A74F/I/K/R/T/V, P77V, G79A, T80M/S/V, Q83F/L/S/T/V, G86L/Q, P87K, R89G/K/L/T, E90L/R/S/T/V, H91Y, F92M, E93A, T94M/N, S100G, R101F/W, V102I, K103L/Q/R, I104A/C/D/G/L/N/P/R/S/T/W/Y, D106E/G/L/M/P/R/T, D107A/G/H/S/T, L108A/C/E, F109E/G/L/P/R/S/T, P111A/G/L, Q112I/L, A113G/S, TI 6M, H119C/G/M/Q/R/S/T/V, D120C, N121F/H/L/M/Q, A126L/S, H128F/V/W, P129A/G/S, G130A, M133A/L, R134H, Y136F/H, R141S, P144Q/S, V146C/I, T147A/N/S, V151L, G152A/C, G155A/I/N/T/V/W, R156Y, E157P, I160L, N162F, A163G, E164A/G/K/Q/S/W, A167F/T/V/W, A168R/V, G169A/C/D/I/L/M/S, G170D/H/K/M/R/S/V, I171C/V, P172S, P177V, Q179N, A180Q, M181A/C/L/V, P182G, L183M/S/V, N185S/T, P187H/Q/S/V, E188T, R190I, E191A/R/S/W, F192L, E194A/R, Q195G/M/T/V, A196S, D197R, N202F, S206A/H, N207A/L/M/R/T/V, L208V, Q210E/L, E211A/C/F/H/I/K/L/M/R/T/W, R212A, W215L, N216V, E217A/V, Q218D/L/N/R/V, V221A, S222A/G/M/Q, Q225E/G, T229C/H/V, Q231L/M/V, G232S, P233A/S/V, K234A/M/N/R/V/Y, A236C/S/V, L237I/K/L/M/Q/V, V238L, H239A/F/G/H/I/M/Q/R/T/W, T240L/V, P241R, E242D/T, K243F/G/R/Y, T244R/W, Y245F/Q/W, D246A/R/S/T/V, I247L, P248E/G/K/L/R/V, P249A/G/I/L/M/R/S, A250H/I/M/T, H251K/L/T/V, E252A/C/G/K/T/V, R253D/E/G/H/K/L/P/S/T/V, R254I/L/M/P/Q/T, V255A/C/E/G/I/K/S/W, V256C/H/M, P258R/S/V, F265Y, Y271W, N276D/E/G/S, Q274R, H275S, E276G, N287A/S/V/Y, L288V, A291G, L292F/I/K/V, K293M, V294L, E295A, H296N, T299G/S, R303D/F/H/M/S/V/W, D305S/T, A307F/G, E308D/F/L/V, N310A/C, D311E/F/G/L/M/Q/R/S/T, Q312R, K314Q/S/V, Q315S, Q316A/D/E/I/K/S/Y, F317M/W/Y, or A320G/R/S, or combinations thereof, wherein the amino acid positions are relative to the reference sequence corresponding to amino acid residues 12-321 of SEQ ID NO: 2, or relative to the reference sequence corresponding to SEQ ID NO: 2.

[0210] In some embodiments, the amino acid sequence of the engineered adenosine kinase comprises at least a substitution at amino acid position 24, 27, 31, 40, 43, 51, 52, 74, 77, 79, 109, 113, 119, 121, 126, 129, 169, 181, 185, 207, 211, 233,234, 237, 239, 244, 246, 249, 251, 252, 253, 276, 299, 305, 312, or 316, or combinations thereof, wherein the amino acid positions are relative to the reference sequence corresponding to amino acid residues 12-321 of SEQ ID NO: 2, or relative to the reference sequence corresponding to SEQ ID NO: 2.

[0211] In some embodiments, the amino acid sequence of the engineered adenosine kinase comprises at least a substitution, or amino acid residue 241/N/V, 27A/C/G/K/P/R/S/W, 31F/H/L/R/W/Y, 40H/M/R/W, 43E/K/R/S/V, 51F/G/S, 52C/D/F/G/S/T, 74F/I/K/R/T/V, 77V, 79A, 109E/G/L/P/R/S/T, 113G/S, 119C/G/M/Q/R/S/T/V, 121F/H/L/M/Q, 126L/S, 129A/G/S, 169A/C/D/I/L/M/S, 181A/C/L/V, 185S/T, 207A/L/M/R/T/V, 211A/C/F/H/I/K/L/M/T/W, 233A/S/V, 234A/M/N/R/V/Y, 237K/I/L/M/Q/V, 239A/F/G/H/I/M/Q/R/T/W, 244R/W, 246A/R/S/T/V, 249A/G/I/L/M/R/S, 251K/L/T/V, 252A/C/G/K/T/V, 253D/E/G/H/K/L/P/S/T/V, 276D/E/G/S, 299G/S, 305S/T, 312R, or 316A/D/E/I/K/S/Y, or combinations thereof, wherein the amino acid positions are relative to the reference sequence corresponding to amino acid residues 12-321 of SEQ ID NO: 2, or relative to the reference sequence corresponding to SEQ ID NO: 2.

[0212] In some embodiments, the amino acid sequence of the engineered adenosine kinase comprises at least a substitution, or amino acid residue 24N, 27W, 31Y, 40R, 43R, 51F, 52D, 74R, 77V, 79A, 109S, 113G, 119M, 121H/Q, 126L, 129G/S, 169M, 181L/V, 185S, 207R, 211A/T, 233S, 234A, 237V, 239M, 244R, 246V, 249A, 251K, 252A/T, 253S, 276E, 299G, 305T, 312R, or 316D/Y, or combinations thereof, wherein the amino acid positions are relative to the reference sequence corresponding to amino acid residues 12-321 of SEQ ID NO: 2, or relative to the reference sequence corresponding to SEQ ID NO: 2.

[0213] In some embodiments, the amino acid sequence of the engineered adenosine kinase comprises at least a substitution T24N, V27W, Q31Y, K40R, I43R, P51F, R52D, A74R, P77V, G79A, F109S, A113G, H119M, N121H/Q, A126L, P129G/S, G169M, M181L/V, N185S, N207R, E211A/T, P233S, K234A, L237V, H239M, T244R, D246V, P249A, H251K, E252T, R253S, N276E, T299G, D305T, Q312R, or Q316D/Y, or combinations thereof, wherein the amino acid positions are relative to the reference sequence corresponding to amino acid residues 12-321 of SEQ ID NO: 2, or relative to the reference sequence corresponding to SEQ ID NO: 2.

[0214] In some embodiments, the amino acid sequence of the engineered adenosine kinase comprises at least a substitution at amino acid position 40, 43, 109, 181, 233, or 316, or combinations thereof, wherein the amino acid positions are relative to the reference sequence corresponding to amino acid residues 12-321 of SEQ ID NO: 2, or relative to the reference sequence corresponding to SEQ ID NO: 2. In some embodiments, the amino acid sequence of the engineered adenosine kinase comprises at least a substitution or amino acid residue 40R, 43R, 109S, 181L, 233S, or 316D, or combinations thereof, wherein the amino acid positions are relative to the reference sequence corresponding to amino acid residues 12-321 of SEQ ID NO: 2, or relative to the reference sequence corresponding to SEQ ID NO: 2. In some embodiments, the amino acid sequence of the engineered adenosine kinase comprises at least a substitution K40R, I43R, F109S, M181L, P233S, or Q316D, or combinations thereof, wherein the amino acid positions are relative to the reference sequence corresponding to amino acid residues 12-321 of SEQ ID NO: 2, or relative to the reference sequence corresponding to SEQ ID NO: 2.

[0215] In some embodiments, the amino acid sequence of the engineered adenosine kinase comprises at least a substitution set at amino acid positions 40/43/109/181/233/316, wherein the amino acid positions are relative to the reference sequence corresponding to amino acid residues 12-321 of SEQ ID NO: 2, or relative to the reference sequence corresponding to SEQ ID NO: 2. In some embodiments, the amino acid sequence of the engineered adenosine kinase comprises at least a substitution set or amino acid residues 40R/43R/109S/181L/233S/316D, wherein the amino acid positions are relative to the reference sequence corresponding to amino acid residues 12-321 of SEQ ID NO: 2, or relative to the reference sequence corresponding to SEQ ID NO: 2. In some embodiments, the amino acid sequence of the engineered adenosine kinase comprises at least a substitution set K40R/I43R/F109S/M181L/P233S/Q316D, wherein the amino acid positions are relative to the reference sequence corresponding to amino acid residues 12-321 of SEQ ID NO: 2, or relative to the reference sequence corresponding to SEQ ID NO: 2.

[0216] In some embodiments, the amino acid sequence of the engineered adenosine kinase comprises at least a substitution at amino acid position 77, 79, 211, or 316, or combinations thereof, wherein the amino acid positions are relative to the reference sequence corresponding to amino acid residues 12-321 of SEQ ID NO: 2, or relative to the reference sequence corresponding to SEQ ID NO: 2. In some embodiments, the amino acid sequence of the engineered adenosine kinase comprises at least a substitution 77V, 79A, 211T, or 316Y, or combinations thereof, wherein the amino acid positions are relative to the reference sequence corresponding to amino acid residues 12-321 of SEQ ID NO: 2, or relative to the reference sequence corresponding to SEQ ID NO: 2. In some embodiments, the amino acid sequence of the engineered adenosine kinase comprises at least a substitution P77V, G79A, E211T, or D316Y, or combinations thereof, wherein the amino acid positions are relative to the reference sequence corresponding to amino acid residues 12-321 of SEQ ID NO: 2, or relative to the reference sequence corresponding to SEQ ID NO: 2.

[0217] In some embodiments, the amino acid sequence of the engineered adenosine kinase comprises at least a substitution set at amino acid positions 77/79/211/316, wherein the amino acid positions are relative to the reference sequence corresponding to amino acid residues 12-321 of SEQ ID NO: 2, or relative to the reference sequence corresponding to SEQ ID NO: 2. In some embodiments, the amino acid sequence of the engineered adenosine kinase comprises at least a substitution set or amino acid residues 77V/79A/211T/316Y, wherein the amino acid positions are relative to the reference sequence corresponding to amino acid residues 12-321 of SEQ ID NO: 2, or relative to the reference sequence corresponding to SEQ ID NO: 2. In some embodiments, the amino acid sequence of the engineered adenosine kinase comprises at least a substitution set P77V/G79A/E211T/D316Y, wherein the amino acid positions are relative to the reference sequence corresponding to amino acid residues 12-321 of SEQ ID NO: 2, or relative to the reference sequence corresponding to SEQ ID NO: 2.

[0218] In some embodiments, the amino acid sequence of the engineered adenosine kinase comprises at least a substitution at amino acid position 119, 129, 234, or 252, or combinations thereof, wherein the amino acid positions are relative to the reference sequence corresponding to amino acid residues 12-321 of SEQ ID NO: 2, or relative to the reference sequence corresponding to SEQ ID NO: 2. In some embodiments, the amino acid sequence of the engineered adenosine kinase comprises at least a substitution 119M, 129G, 234A, or 252T, or combinations thereof, wherein the amino acid positions are relative to the reference sequence corresponding to amino acid residues 12-321 of SEQ ID NO: 2, or relative to the reference sequence corresponding to SEQ ID NO: 2. In some embodiments, the amino acid sequence of the engineered adenosine kinase comprises at least a substitution H119M, P129G, K234A, or E252T, or combinations thereof, wherein the amino acid positions are relative to the reference sequence corresponding to amino acid residues 12-321 of SEQ ID NO: 2, or relative to the reference sequence corresponding to SEQ ID NO: 2.

[0219] In some embodiments, the amino acid sequence of the engineered adenosine kinase comprises at least a substitution set at amino acid positions 119/129/234/252, wherein the amino acid positions are relative to the reference sequence corresponding to amino acid residues 12-321 of SEQ ID NO: 2, or relative to the reference sequence corresponding to SEQ ID NO: 2. In some embodiments, the amino acid sequence of the engineered adenosine kinase comprises at least a substitution set or amino acid residues 119M/129G/234A/252T, wherein the amino acid positions are relative to the reference sequence corresponding to amino acid residues 12-321 of SEQ ID NO: 2, or relative to the reference sequence corresponding to SEQ ID NO: 2. In some embodiments, the amino acid sequence of the engineered adenosine kinase comprises at least a substitution set H119M/P129G/K234A/E252T, wherein the amino acid positions are relative to the reference sequence corresponding to amino acid residues 12-321 of SEQ ID NO: 2, or relative to the reference sequence corresponding to SEQ ID NO: 2.

[0220] In some embodiments, the amino acid sequence of the engineered adenosine kinase comprises at least a substitution at amino acid position 181, 211, or 251, or combinations thereof, wherein the amino acid positions are relative to the reference sequence corresponding to amino acid residues 12-321 of SEQ ID NO: 2, or relative to the reference sequence corresponding to SEQ ID NO: 2. In some embodiments, the amino acid sequence of the engineered adenosine kinase comprises at least a substitution 181V, 211A, or 251K, or combinations thereof, wherein the amino acid positions are relative to the reference sequence corresponding to amino acid residues 12-321 of SEQ ID NO: 2, or relative to the reference sequence corresponding to SEQ ID NO: 2. In some embodiments, the amino acid sequence of the engineered adenosine kinase comprises at least a substitution L181V, T211A, or H251K, or combinations thereof, wherein the amino acid positions are relative to the reference sequence corresponding to amino acid residues 12-321 of SEQ ID NO: 2, or relative to the reference sequence corresponding to SEQ ID NO: 2.

[0221] In some embodiments, the amino acid sequence of the engineered adenosine kinase comprises at least a substitution set at amino acid positions 181/211/251, wherein the amino acid positions are relative to the reference sequence corresponding to amino acid residues 12-321 of SEQ ID NO: 2, or relative to the reference sequence corresponding to SEQ ID NO: 2. In some embodiments, the amino acid sequence of the engineered adenosine kinase comprises at least a substitution set 181V/211A/251K, wherein the amino acid positions are relative to the reference sequence corresponding to amino acid residues 12-321 of SEQ ID NO: 2, or relative to the reference sequence corresponding to SEQ ID NO: 2. In some embodiments, the amino acid sequence of the engineered adenosine kinase comprises at least a substitution set L181V/T211A/H251K, wherein the amino acid positions are relative to the reference sequence corresponding to amino acid residues 12-321 of SEQ ID NO: 2, or relative to the reference sequence corresponding to SEQ ID NO: 2.

[0222] In some embodiments, the amino acid sequence of the engineered adenosine kinase comprises at least a substitution at amino acid position 52 or 169, or combination thereof, wherein the amino acid positions are relative to the reference sequence corresponding to amino acid residues 12-321 of SEQ ID NO: 2, or relative to the reference sequence corresponding to SEQ ID NO: 2. In some embodiments, the amino acid sequence of the engineered adenosine kinase comprises at least a substitution 52D or 169M, or combination thereof, wherein the amino acid positions are relative to the reference sequence corresponding to amino acid residues 12-321 of SEQ ID NO: 2, or relative to the reference sequence corresponding to SEQ ID NO: 2. In some embodiments, the amino acid sequence of the engineered adenosine kinase comprises at least a substitution R52D or G169M, or combination thereof, wherein the amino acid positions are relative to the reference sequence corresponding to amino acid residues 12-321 of SEQ ID NO: 2, or relative to the reference sequence corresponding to SEQ ID NO: 2.

[0223] In some embodiments, the amino acid sequence of the engineered adenosine kinase comprises at least a substitution set at amino acid positions 52/169, wherein the amino acid positions are relative to the reference sequence corresponding to amino acid residues 12-321 of SEQ ID NO: 2, or relative to the reference sequence corresponding to SEQ ID NO: 2. In some embodiments, the amino acid sequence of the engineered adenosine kinase comprises at least a substitution set or amino acid residues 52D/169M, wherein the amino acid positions are relative to the reference sequence corresponding to amino acid residues 12-321 of SEQ ID NO: 2, or relative to the reference sequence corresponding to SEQ ID NO: 2. In some embodiments, the amino acid sequence of the engineered adenosine kinase comprises at least a substitution set R52D/G169M, wherein the amino acid positions are relative to the reference sequence corresponding to amino acid residues 12-321 of SEQ ID NO: 2, or relative to the reference sequence corresponding to SEQ ID NO: 2.

[0224] In some embodiments, the amino acid sequence of the engineered adenosine kinase comprises at least a substitution at amino acid position 121, 129, 207, 237, or 249, or combinations thereof, wherein the amino acid positions are relative to the reference sequence corresponding to amino acid residues 12-321 of SEQ ID NO: 2, or relative to the reference sequence corresponding to SEQ ID NO: 2. In some embodiments, the amino acid sequence of the engineered adenosine kinase comprises at least a substitution or amino acid residue 121Q, 129S, 207R, 237V, or 249A, or combinations thereof, wherein the amino acid positions are relative to the reference sequence corresponding to amino acid residues 12-321 of SEQ ID NO: 2, or relative to the reference sequence corresponding to SEQ ID NO: 2. In some embodiments, the amino acid sequence of the engineered adenosine kinase comprises at least a substitution H121Q, G129S, N207R, L237V, or P249A, or combinations thereof, wherein the amino acid positions are relative to the reference sequence corresponding to amino acid residues 12-321 of SEQ ID NO: 2, or relative to the reference sequence corresponding to SEQ ID NO: 2.

[0225] In some embodiments, the amino acid sequence of the engineered adenosine kinase comprises at least a substitution set at amino acid positions 121/129/207/237/249, wherein the amino acid positions are relative to the reference sequence corresponding to amino acid residues 12-321 of SEQ ID NO: 2, or relative to the reference sequence corresponding to SEQ ID NO: 2. In some embodiments, the amino acid sequence of the engineered adenosine kinase comprises at least a substitution set 121Q/129S/207R/237V/249A, wherein the amino acid positions are relative to the reference sequence corresponding to amino acid residues 12-321 of SEQ ID NO: 2, or relative to the reference sequence corresponding to SEQ ID NO: 2. In some embodiments, the amino acid sequence of the engineered adenosine kinase comprises at least a substitution set H121Q/G129S/N207R/L237V/P249A, wherein the amino acid positions are relative to the reference sequence corresponding to amino acid residues 12-321 of SEQ ID NO: 2, or relative to the reference sequence corresponding to SEQ ID NO: 2.

[0226] In some embodiments, the amino acid sequence of the engineered adenosine kinase comprises at least a substitution at amino acid position 185 or 276, or combination thereof, wherein the amino acid positions are relative to the reference sequence corresponding to amino acid residues 12-321 of SEQ ID NO: 2, or relative to the reference sequence corresponding to SEQ ID NO: 2. In some embodiments, the amino acid sequence of the engineered adenosine kinase comprises at least a substitution or amino acid residue 185S or 276E, or combination thereof, wherein the amino acid positions are relative to the reference sequence corresponding to amino acid residues 12-321 of SEQ ID NO: 2, or relative to the reference sequence corresponding to SEQ ID NO: 2. In some embodiments, the amino acid sequence of the engineered adenosine kinase comprises at least a substitution N185S or N276E, or combinations thereof, wherein the amino acid positions are relative to the reference sequence corresponding to amino acid residues 12-321 of SEQ ID NO: 2, or relative to the reference sequence corresponding to SEQ ID NO: 2.

[0227] In some embodiments, the amino acid sequence of the engineered adenosine kinase comprises at least a substitution set at amino acid positions 185/276, wherein the amino acid positions are relative to the reference sequence corresponding to amino acid residues 12-321 of SEQ ID NO: 2, or relative to the reference sequence corresponding to SEQ ID NO: 2. In some embodiments, the amino acid sequence of the engineered adenosine kinase comprises at least a substitution set or amino acid residues 185S/276E, wherein the amino acid positions are relative to the reference sequence corresponding to amino acid residues 12-321 of SEQ ID NO: 2, or relative to the reference sequence corresponding to SEQ ID NO: 2. In some embodiments, the amino acid sequence of the engineered adenosine kinase comprises at least a substitution set N185S/N276E, wherein the amino acid positions are relative to the reference sequence corresponding to amino acid residues 12-321 of SEQ ID NO: 2, or relative to the reference sequence corresponding to SEQ ID NO: 2.

[0228] In some embodiments, the amino acid sequence of the engineered adenosine kinase comprises at least a substitution at amino acid position 31, 74, 239, 244, or 246, or combinations thereof, wherein the amino acid positions are relative to the reference sequence corresponding to amino acid residues 12-321 of SEQ ID NO: 2, or relative to the reference sequence corresponding to SEQ ID NO: 2. In some embodiments, the amino acid sequence of the engineered adenosine kinase comprises at least a substitution or amino acid residue 31Y, 74R, 239M, 244R, or 246V, or combinations thereof, wherein the amino acid positions are relative to the reference sequence corresponding to amino acid residues 12-321 of SEQ ID NO: 2, or relative to the reference sequence corresponding to SEQ ID NO: 2. In some embodiments, the amino acid sequence of the engineered adenosine kinase comprises at least a substitution Q31Y, A74R, H239M, T244R, or D246V, wherein the amino acid positions are relative to the reference sequence corresponding to amino acid residues 12-321 of SEQ ID NO: 2, or relative to the reference sequence corresponding to SEQ ID NO: 2.

[0229] In some embodiments, the amino acid sequence of the engineered adenosine kinase comprises at least a substitution set at amino acid positions 31/74/239/244/246, wherein the amino acid positions are relative to the reference sequence corresponding to amino acid residues 12-321 of SEQ ID NO: 2, or relative to the reference sequence corresponding to SEQ ID NO: 2. In some embodiments, the amino acid sequence of the engineered adenosine kinase comprises at least a substitution set 31Y/74R/239M/244R/246V, wherein the amino acid positions are relative to the reference sequence corresponding to amino acid residues 12-321 of SEQ ID NO: 2, or relative to the reference sequence corresponding to SEQ ID NO: 2. In some embodiments, the amino acid sequence of the engineered adenosine kinase comprises at least a substitution set Q31Y/A74R/H239M/T244R/D246V, wherein the amino acid positions are relative to the reference sequence corresponding to amino acid residues 12-321 of SEQ ID NO: 2, or relative to the reference sequence corresponding to SEQ ID NO: 2.

[0230] In some embodiments, the amino acid sequence of the engineered adenosine kinase comprises at least a substitution at amino acid position 27, 305, or 312, or combinations thereof, wherein the amino acid positions are relative to the reference sequence corresponding to amino acid residues 12-321 of SEQ ID NO: 2, or relative to the reference sequence corresponding to SEQ ID NO: 2. In some embodiments, the amino acid sequence of the engineered adenosine kinase comprises at least a substitution or amino acid residue 27W, 305T, or 312R, or combinations thereof, wherein the amino acid positions are relative to the reference sequence corresponding to amino acid residues 12-321 of SEQ ID NO: 2, or relative to the reference sequence corresponding to SEQ ID NO: 2. In some embodiments, the amino acid sequence of the engineered adenosine kinase comprises at least a substitution V27W, D305T, or Q312R, wherein the amino acid positions are relative to the reference sequence corresponding to amino acid residues 12-321 of SEQ ID NO: 2, or relative to the reference sequence corresponding to SEQ ID NO: 2.

[0231] In some embodiments, the amino acid sequence of the engineered adenosine kinase comprises at least a substitution set at amino acid positions 27/305/312, wherein the amino acid positions are relative to the reference sequence corresponding to amino acid residues 12-321 of SEQ ID NO: 2, or relative to the reference sequence corresponding to SEQ ID NO: 2. In some embodiments, the amino acid sequence of the engineered adenosine kinase comprises at least a substitution set 27W/305T/312R, wherein the amino acid positions are relative to the reference sequence corresponding to amino acid residues 12-321 of SEQ ID NO: 2, or relative to the reference sequence corresponding to SEQ ID NO: 2. In some embodiments, the amino acid sequence of the engineered adenosine kinase comprises at least a substitution set V27W/D305T/Q312R, wherein the amino acid positions are relative to the reference sequence corresponding to amino acid residues 12-321 of SEQ ID NO: 2, or relative to the reference sequence corresponding to SEQ ID NO: 2.

[0232] In some embodiments, the amino acid sequence of the engineered adenosine kinase comprises at least a substitution at amino acid position 126, or 299, or combinations thereof, wherein the amino acid positions are relative to the reference sequence corresponding to amino acid residues 12-321 of SEQ ID NO: 2, or relative to the reference sequence corresponding to SEQ ID NO: 2. In some embodiments, the amino acid sequence of the engineered adenosine kinase comprises at least a substitution or amino acid residue 126L, or 299G, or combinations thereof, wherein the amino acid positions are relative to the reference sequence corresponding to amino acid residues 12-321 of SEQ ID NO: 2, or relative to the reference sequence corresponding to SEQ ID NO: 2. In some embodiments, the amino acid sequence of the engineered adenosine kinase comprises at least a substitution A126L, or T299G, wherein the amino acid positions are relative to the reference sequence corresponding to amino acid residues 12-321 of SEQ ID NO: 2, or relative to the reference sequence corresponding to SEQ ID NO: 2.

[0233] In some embodiments, the amino acid sequence of the engineered adenosine kinase comprises at least a substitution set at amino acid positions 126/299, wherein the amino acid positions are relative to the reference sequence corresponding to amino acid residues 12-321 of SEQ ID NO: 2, or relative to the reference sequence corresponding to SEQ ID NO: 2. In some embodiments, the amino acid sequence of the engineered adenosine kinase comprises at least a substitution set 126L/299G, wherein the amino acid positions are relative to the reference sequence corresponding to amino acid residues 12-321 of SEQ ID NO: 2, or relative to the reference sequence corresponding to SEQ ID NO: 2. In some embodiments, the amino acid sequence of the engineered adenosine kinase comprises at least a substitution set A126L/T299G, wherein the amino acid positions are relative to the reference sequence corresponding to amino acid residues 12-321 of SEQ ID NO: 2, or relative to the reference sequence corresponding to SEQ ID NO: 2.

[0234] In some embodiments, the amino acid sequence of the engineered adenosine kinase comprises at least a substitution or substitution set at amino acid position(s) 109/111, 104/111, 38, 40, 111, 55/316, 258, 106/111, 103/111, 121, 207, 316, 43, 254, 233, 130, 249, 107/111, 253, 210, 136/249, 208, 34, 211, 308, 181, 248, 56, 89, 67, 111/121/233/316, 111/121/181/211/233/248/308/316, 53/111/121/181/211/233/248/308/316, 53/111/121/181/211/233/248/308/316/320, 53/86/111/121/169/181/211/233/248/308/316/320, or 53/77/79/86/111/121/169/170/181/211/233/234/248/308/316/320, wherein the amino acid positions are relative to the reference sequence corresponding to amino acid residues 12-321 of SEQ ID NO: 2, or relative to the reference sequence corresponding to SEQ ID NO: 2.

[0235] In some embodiments, the amino acid sequence of the engineered adenosine kinase comprises at least a substitution or substitution set or amino acid residue(s) 109R/111A, 104G/111A, 38C, 104A/111A, 104Y/111A, 40R, 111G, 109S/111A, 55H/316S, 109G/111A, 258V, 106E/111A, 104N/111A, 109T/111A, 109P/111A, 103Q/111A, 104D/111A, 104R/111A, 121F, 104S/111A, 104T/111A, 207R, 1I1A, 109E/111A, 103R/111A, 109L/111A, 104L/111A, 106P/111A, 316E, 43R, 103L/111A, 316S, 254P, 233S, 130A, 316D, 249G, 104P/111A, 104W/111A, 249S, 107T/111A, 106G/111A, 253P, 121H, 210E, 136H/249G, 208V, 34K, 107S/111A, 107G/111A, 211T, 308F, 181L, 233V, 107A/111A, 34R, 38V, 248R, 56S, 316K, 248V, 248K, 89T, 308V, 106R/111A, 67G, 111A/121H/233S/316S, 111A/121H/181L/211T/233S/248R/308L/316S, 53L/111A/121H/181L/211T/233S/248R/308L/316S, 53L/111A/121H/181L/211T/233S/248R/308L/316S/320S, 53L/86Q/111A/121H/169A/181L/211T/233S/248R/308L/316S/320S, or 53L/77V/79A/86Q/111A/121H/169A/170D/181L/211T/233S/234R/248R/308L/316S/320S, wherein the amino acid positions are relative to the reference sequence corresponding to amino acid residues 12-321 of SEQ ID NO: 2, or relative to the reference sequence corresponding to SEQ ID NO: 2.

[0236] In some embodiments, the amino acid sequence of the engineered adenosine kinase comprises at least a substitution or substitution set F109R/P111A, 1104G/P111A, P38C, I104A/P111A, 1104Y/P111A, K40R, P111G, F109S/P111A, R55H/Q316S, F109G/P111A, P258V, D106E/P111A, 1104N/P111A, F109T/P111A, F109P/P111A, K103Q/P111A, I104D/P111A, I104R/P111A, N121F, I104S/P111A, I104T/P111A, N207R, P1I1A, F109E/P111A, K103R/P111A, F109L/P111A, I104L/P111A, D106P/P111A, Q316E, I43R, K103L/P111A, Q316S, R254P, P233S, G130A, Q316D, P249G, I104P/P111A, I104W/P111A, P249S, D107T/P111A, D106G/P111A, R253P, N121H, Q210E, Y136H/P249G, L208V, N34K, D107S/P111A, D107G/P111A, E211T, E308F, M181L, P233V, D107A/P111A, N34R, P38V, P248R, E56S, Q316K, P248V, P248K, R89T, E308V, D106R/P111A, N67G, P111A/N121H/P233S/Q316S, P111A/N121H/M181L/E211T/P233S/P248R/E308L/Q316S, M53L/P111A/N121H/M181L/E211T/P233S/P248R/E308L/Q316S, M53L/P111A/N121H/M181L/E211T/P233S/P248R/E308L/Q316S/A320S, M53L/G86Q/P111A/N121H/G169A/M181L/E211T/P233S/P248R/E308L/Q316S/A320S, or M53L/P77V/G79A/G86Q/P111A/N121H/G169A/G170D/M181L/E211T/P233S/K234R/P248R/E308 L/Q316S/A320S, wherein the amino acid positions are relative to the reference sequence corresponding to amino acid residues 12-321 of SEQ ID NO: 2, or relative to the reference sequence corresponding to SEQ ID NO: 2.

[0237] In some embodiments, the amino acid sequence of the engineered adenosine kinase comprises at least a substitution at amino acid position 34, 112, 126, 128, 155, 179, 183, 229, 236, 248, 253, 254, 292, 293, or 299, or combinations thereof, wherein the amino acid positions are relative to the reference sequence corresponding to amino acid residues 12-321 of SEQ ID NO: 2, or relative to the reference sequence corresponding to SEQ ID NO: 2.

[0238] In some embodiments, the amino acid sequence of the engineered adenosine kinase comprises at least a substitution, or amino acid residue 34C, 112I, 126L, 128V, 155T, 179N, 183S, 183V, 229C, 229V, 236C, 248E, 253D, 253E, 253G, 253H, 253K, 253L, 253S, 253T, 253V, 254M, 254T, 292I, 292V, 293M, or 299G, or combinations thereof, wherein the amino acid positions are relative to the reference sequence corresponding to residues 12-321 of SEQ ID NO: 2, or relative to the reference sequence corresponding to SEQ ID NO: 2.

[0239] In some embodiments, the amino acid sequence of the engineered adenosine kinase comprises at least a substitution at amino acid position 14, 38, 46, 108, 146, 211, 243, 275, 303, 311, or 320, or combinations thereof, wherein the amino acid positions are relative to the reference sequence corresponding to amino acid residues 12-321 of SEQ ID NO: 2, or relative to the reference sequence corresponding to SEQ ID NO: 2.

[0240] In some embodiments, the amino acid sequence of the engineered adenosine kinase comprises at least a substitution, or amino acid residue 14S, 14T, 38R, 46I, 108A, 146C, 211R, 243F, 275S, 303D, 303S, 311E, 320G, or 320R, or combinations thereof, wherein the amino acid positions are relative to the reference sequence corresponding to residues 12-321 of SEQ ID NO: 2, or relative to the reference sequence corresponding to SEQ ID NO: 2.

[0241] In some embodiments, the amino acid sequence of the engineered adenosine kinase comprises at least a substitution at amino acid position 94, 106, 108, 194, 274, 303, 307, or 315, or combinations thereof, wherein the amino acid positions are relative to the reference sequence corresponding to amino acid residues 12-321 of SEQ ID NO: 2, or relative to the reference sequence corresponding to SEQ ID NO: 2.

[0242] In some embodiments, the amino acid sequence of the engineered adenosine kinase comprises at least a substitution, or amino acid residue 94M, 106L, 108E, 194R, 274R, 303V, 307G, or 315S, or combinations thereof, wherein the amino acid positions are relative to the reference sequence corresponding to residues 12-321 of SEQ ID NO: 2, or relative to the reference sequence corresponding to SEQ ID NO: 2.

[0243] In some embodiments, the amino acid sequence of the engineered adenosine kinase comprises at least a substitution or substitution set at amino acid position(s) 112/183/292/299, 112/292, 126/299, 155, 155/183/299, 155/299, 183/255/299, 183/299, 229/299, 255/299, or 292, wherein the amino acid positions are relative to the reference sequence corresponding to amino acid residues 12-321 of SEQ ID NO: 2, or relative to the reference sequence corresponding to SEQ ID NO: 2.

[0244] In some embodiments, the amino acid sequence of the engineered adenosine kinase comprises at least a substitution or substitution set, or amino acid residue(s) 112I/183V/292I/299G, 112I/292I, 126L/299G, 155T, 155T/183V/299G, 155T/299G, 183V/255I/299G, 183V/299G, 229H/299G, 255I/299G, or 292I, wherein the amino acid positions are relative to the reference sequence corresponding to residues 12-321 of SEQ ID NO: 2, or relative to the reference sequence corresponding to SEQ ID NO: 2.

[0245] In some embodiments, the amino acid sequence of the engineered adenosine kinase comprises at least a substitution at amino acid position 26, 27, 28, 29, 31, 33, 35, 42, 136, 212, 218, 237, 239, 245, 246, 252, 276, or 316, or combinations thereof, wherein the amino acid positions are relative to the reference sequence corresponding to amino acid residues 12-321 of SEQ ID NO: 2, or relative to the reference sequence corresponding to SEQ ID NO: 2.

[0246] In some embodiments, the amino acid sequence of the engineered adenosine kinase comprises at least a substitution, or amino acid residue 26F, 27C, 27G, 27R, 27S, 28L, 28M, 29G, 31H, 33A, 33P, 35D, 35E, 42G, 42N, 42Q, 136F, 212A, 218R, 237K, 237L, 237Q, 239A, 239G, 239H, 239I, 239T, 239W, 245F, 245Q, 246A, 246T, 252A, 252G, 276G, 316A, or 316I, or combinations thereof, wherein the amino acid positions are relative to the reference sequence corresponding to residues 12-321 of SEQ ID NO: 2, or relative to the reference sequence corresponding to SEQ ID NO: 2.

[0247] In some embodiments, the amino acid sequence of the engineered adenosine kinase comprises at least a substitution or substitution set at amino acid position(s) 26/27, 26/27/28, 26/27/28/31, 26/27/28/245, 26/28/31, 27, 27/28, 27/28/29/126, 27/29, 27/29/126, 27/29/237, 27/29/245, 27/31/126/245, 27/31/155, 27/126, 27/126/155, 27/126/237, 27/126/237/245, 27/237, 27/245, 28, 28/31, 28/31/239, 28/42/126/245, 28/42/245, 28/239, 29/31, 29/31/126/239, 30/31/33/35/126/218, 30/31/33/126/276/316, 30/33/35, 31/33/218/276, 31/126, 31/126/155, 33, 33/126/239, 42, 126, 126/155, 126/155/237, 126/155/239/276, 126/155/239/316, 126/239, 126/239/316, 126/245, 126/316, 155/276/316, 155/316, 218, 218/239/316, 239, 245, 252/276, or 316, wherein the amino acid positions are relative to the reference sequence corresponding to amino acid residues 12-321 of SEQ ID NO: 2, or relative to the reference sequence corresponding to SEQ ID NO: 2.

[0248] In some embodiments, the amino acid sequence of the engineered adenosine kinase comprises at least a substitution or substitution set, or amino acid residue(s) 26F/27G/28M, 26F/27R, 26F/27R/28L/31H, 26F/27R/28M/245F, 26F/28M/31H, 27G, 27G/28M, 27G/29G, 27G/29G/237K, 27G/29G/237Q, 27G/29G/245F, 27G/31H/126A/245F, 27G/31H/155T, 27G/126A, 27G/126A/155T, 27G/126A/237K, 27G/126A/237Q/245F, 27G/237K, 27G/245F, 27R, 27R/28M/29G/126A, 27R/29G/126A, 27R/245F, 28L/31H/239T, 28L/239T, 28M, 28M/31H, 28M/42N/126A/245F, 28M/42N/245F, 29G/31H, 29G/31H/126A/239T, 30G/31H/33A/35D/126A/218N, 30G/31H/33A/126A/276G/316I, 30G/33A/35D, 31H/33A/218N/276G, 31H/126A, 31H1126A/155T, 33A, 33A/126A/239H, 42N, 126A, 126A/155T, 126A/155T/237K, 126A/155T/239H/316I, 126A/155T/239T/276G, 126A/239H, 126A/239H/316I, 126A/245F, 126A/316I, 155T/276G/316I, 155T/316I, 218N, 218N/239H/316I, 239H, 245F, 252T/276G, or 316I, wherein the amino acid positions are relative to the reference sequence corresponding to residues 12-321 of SEQ ID NO: 2, or relative to the reference sequence corresponding to SEQ ID NO: 2.

[0249] In some embodiments, the amino acid sequence of the engineered adenosine kinase comprises at least a substitution at an amino acid position set forth in Tables 7.1, 7.2, 8.1, 9.1, 10.2, 11.2, 12.2, 13.2, 14.2, 15.2, 16.2, 17.2, 18.2, 20.2, 21.2, 22.2, 23.2, 24.2, 25.2, 26.2, 27.2, 28.2, 29.2, 30.2, 31.2, 32.2, 33.2, 34.2, 35.2, 36.2, 37.2, 38.2, 39.2, 40.2, 41.2, 42.2, 43.2, 45.2, 46.2, 47.2, 48.2, 49.2 and 50.2, wherein the amino acid positions are relative to the reference sequence corresponding to amino acid residues 12-321 of SEQ ID NO: 2, or relative to the reference sequence corresponding to SEQ ID NO: 2.

[0250] In some embodiments, the amino acid sequence of the engineered adenosine kinase comprises at least one substitution as set forth in Tables 7.1, 7.2, 8.1, 9.1, 10.2, 11.2, 12.2, 13.2, 14.2, 15.2, 16.2, 17.2, 18.2, 20.2, 21.2, 22.2, 23.2, 24.2, 25.2, 26.2, 27.2, 28.2, 29.2, 30.2, 31.2, 32.2, 33.2, 34.2, 35.2, 36.2, 37.2, 38.2, 39.2, 40.2, 41.2, 42.2, 43.2, 45.2, 46.2, 47.2, 48.2, 49.2 and 50.2, wherein the amino acid positions are relative to the reference sequence corresponding to amino acid residues 12-321 of SEQ ID NO: 2, or relative to the reference sequence corresponding to SEQ ID NO: 2.

[0251] In some embodiments, the amino acid sequence of the engineered adenosine kinase comprises at least a substitution or substitution set at amino acid position(s) set forth in Tables 7.1, 7.2, 8.1, 9.1, 10.2, 11.2, 12.2, 13.2, 14.2, 15.2, 16.2, 17.2, 18.2, 20.2, 21.2, 22.2, 23.2, 24.2, 25.2, 26.2, 27.2, 28.2, 29.2, 30.2, 31.2, 32.2, 33.2, 34.2, 35.2, 36.2, 37.2, 38.2, 39.2, 40.2, 41.2, 42.2, 43.2, 45.2, 46.2, 47.2, 48.2, 49.2 and 50.2, wherein the amino acid positions are relative to the reference sequence corresponding to amino acid residues 12-321 of SEQ ID NO: 2, or relative to the reference sequence corresponding to SEQ ID NO: 2.

[0252] In some embodiments, the amino acid sequence of the engineered adenosine kinase comprises at least a substitution or substitution set of an engineered adenosine kinase variant set forth in Tables 7.1, 7.2, 8.1, 9.1, 10.2, 11.2, 12.2, 13.2, 14.2, 15.2, 16.2, 17.2, 18.2, 20.2, 21.2, 22.2, 23.2, 24.2, 25.2, 26.2, 27.2, 28.2, 29.2, 30.2, 31.2, 32.2, 33.2, 34.2, 35.2, 36.2, 37.2, 38.2, 39.2, 40.2, 41.2, 42.2, 43.2, 45.2, 46.2, 47.2, 48.2, 49.2 and 50.2, wherein the amino acid positions are relative to the reference sequence corresponding to amino acid residues 12-321 of SEQ ID NO: 2, or relative to the reference sequence corresponding to SEQ ID NO: 2.

[0253] In some embodiments, the adenosine kinase comprises an amino acid sequence having at least 70%, 75%, 80%, 81%, 82%, 83%, 84%, 85%, 86%, 87%, 88%, 89%, 90%, 91%, 92%, 93%, 94%, 95%, 96%, 97%, 98%, 99% or more sequence identity to a reference amino acid sequence comprising a substitution or substitution set of an engineered adenosine kinase variant set forth in Tables 7.1, 7.2, 8.1, 9.1, 10.2, 11.2, 12.2, 13.2, 14.2, 15.2, 16.2, 17.2, 18.2, 20.2, 21.2, 22.2, 23.2, 24.2, 25.2, 26.2, 27.2, 28.2, 29.2, 30.2, 31.2, 32.2, 33.2, 34.2, 35.2, 36.2, 37.2, 38.2, 39.2, 40.2, 41.2, 42.2, 43.2, 45.2, 46.2, 47.2, 48.2, 49.2 and 50.2, wherein the amino acid positions are relative to the reference sequence corresponding to amino acid residues 12-321 of SEQ ID NO: 2, or relative to the reference sequence corresponding to SEQ ID NO: 2.

[0254] In some embodiments, the engineered adenosine kinase comprises an amino acid sequence having at least 70%, 75%, 80%, 81%, 82%, 83%, 84%, 85%, 86%, 87%, 88%, 89%, 90%, 91%, 92%, 93%, 94%, 95%, 96%, 97%, 98%, 99%, or more sequence identity to the reference sequence corresponding to residues 12-321 of SEQ ID NO: 90, 254, 370, 734, 896, 1196, 1366, 1382, 1464, 1568, 1616, 1668, 1766, 1826, 1918, or 1942, or to the reference sequence corresponding to SEQ ID NO: 90, 254, 370, 734, 896, 1196, 1366, 1382, 1464, 1568, 1616, 1668, 1766, 1826, 1918, or 1942.

[0255] In some embodiments, the engineered adenosine kinase comprising an amino acid sequence having at least 70%, 75%, 80%, 81%, 82%, 83%, 84%, 85%, 86%, 87%, 88%, 89%, 90%, 91%, 92%, 93%, 94%, 95%, 96%, 97%, 98%, 99%, or more sequence identity to a reference sequence corresponding to residues 12-321 of an even-numbered SEQ ID NO. of SEQ ID NOs: 4-1142, 1194-1808 and 1818-2124, or to a reference sequence corresponding to an even-numbered SEQ ID NO. of SEQ ID NOs: 4-1142, 1194-1808, and 1818-2124.

[0256] In some embodiments, the engineered adenosine kinase comprises an amino acid sequence having at least 70%, 75%, 80%, 81%, 82%, 83%, 84%, 85%, 86%, 87%, 88%, 89%, 90%, 91%, 92%, 93%, 94%, 95%, 96%, 97%, 98%, 99%, or more sequence identity to the reference sequence corresponding to residues 12-321 of SEQ ID NO: 90, 254, 370, 734, 896, 1196, 1366, 1382, 1464, 1568, 1616, 1668, 1766, 1826, 1918, or 1942, or to the reference sequence corresponding to SEQ ID NO: 90, 254, 370, 734, 896, 1196, 1366, 1382, 1464, 1568, 1616, 1668, 1766, 1826, 1918, or 1942, wherein the amino acid sequence comprises one or more substitutions relative to the reference sequence corresponding to residues 12-321 of SEQ ID NO: 90, 254, 370, 734, 896, 1196, 1366, 1382, 1464, 1568, 1616, 1668, 1766, 1826, 1918, or 1942, or relative to the reference sequence corresponding to SEQ ID NO: 90, 254, 370, 734, 896, 1196, 1366, 1382, 1464, 1568, 1616, 1668, 1766, 1826, 1918, or 1942.

[0257] In some embodiments, the engineered adenosine kinase comprises an amino acid sequence having at least 70%, 75%, 80%, 81%, 82%, 83%, 84%, 85%, 86%, 87%, 88%, 89%, 90%, 91%, 92%, 93%, 94%, 95%, 96%, 97%, 98%, 99%, or more sequence identity to the reference sequence corresponding to residues 12-321 of an even-numbered SEQ ID NO. of SEQ ID NOs: 4-1142, 1194-1808 and 1818-2124, or to the reference sequence corresponding to an even-numbered SEQ ID NO. of SEQ ID NOs: 4-1142, 1194-1808 and 1818-2124, wherein the amino acid sequence comprises one or more substitutions relative to the reference sequence corresponding to residues 12-321 of SEQ ID NO: 90, 254, 370, 734, 896, 1196, 1366, 1382, 1464, 1568, 1616, 1668, 1766, 1826, 1918, or 1942, or relative to the reference sequence corresponding to SEQ ID NO: 90, 254, 370, 734, 896, 1196, 1366, 1382, 1464, 1568, 1616, 1668, 1766, 1826, 1918, or 1942.

[0258] In some embodiments, the amino acid sequence of the engineered adenosine kinase comprises at least a substitution at amino acid position 13, 14, 20, 21, 23, 24, 27, 29, 30, 31, 33, 34, 35, 38, 40, 41, 42, 43, 49, 50, 51, 52, 53, 54, 55, 56, 64, 67, 73, 74, 77, 79, 80, 83, 86, 87, 89, 90, 91, 92, 93, 94, 100, 101, 102, 103, 104, 106, 107, 108, 109, 111, 112, 113, 116, 119, 120, 121, 126, 128, 129, 130, 133, 134, 136, 141, 144, 146, 147, 151, 152, 155, 156, 157, 160, 162, 163, 164, 167, 168, 169, 170, 171, 172, 177, 180, 181, 182, 183, 185, 187, 188, 190, 191, 192, 194, 195, 196, 197, 202, 206, 207, 208, 210, 211, 215, 216, 217, 218, 221, 222, 225, 229, 231, 232, 233, 234, 236, 237, 238, 239, 240, 241, 242, 243, 244, 245, 246, 247, 248, 249, 250, 251, 252, 253, 254, 255, 256, 258, 265, 271, 276, 287, 288, 291, 292, 294, 295, 296, 299, 303, 305, 307, 308, 310, 311, 312, 314, 316, 317, or 320, or combinations thereof, wherein the amino acid positions are relative to the reference sequence corresponding to amino acid residues 12-321 of SEQ ID NO: 90, 254, 370, 734, 896, 1196, 1366, 1382, 1464, 1568, 1616, 1668, 1766, 1826, 1918, or 1942, or relative to the reference sequence corresponding to SEQ ID NO: 90, 254, 370, 734, 896, 1196, 1366, 1382, 1464, 1568, 1616, 1668, 1766, 1826, 1918, or 1942.

[0259] In some embodiments, the amino acid sequence of the engineered adenosine kinase comprises at least a substitution or amino acid residue 13A/E/P, 14S/T/V, 20F/V, 21G, 23N, 241/N/V, 26F, 27A/C/G/K/P/R/S/W, 28L/M, 29G/R, 30G/Y, 31F/H/L/R/W/Y, 33A/P/Q/S, 34C/G/K/R, 35D/E/S/V/Y, 38C/R/V, 40H/M/R/W, 41L, 42D, 43E/K/R/S/V, 42G/N/Q, 46I, 49M, 50C, 51F/G/S, 52C/D/F/G/S/T, 53L/R, 54V, 55H, 56F/G/S/Y, 64M/T, 67G, 73A/C/E/M, 74F/I/K/R/T/V, 77V, 79A, 80M/S/V, 83F/L/S/T/V, 86L/Q, 87K, 89G/K/L/T, 90L/R/S/T/V, 91Y, 92M, 93A, 94M/N, 100G, 101F/W, 102I, 103L/Q/R, 104A/C/D/G/L/N/P/R/S/T/W/Y, 106E/G/L/M/P/R/T, 107A/G/H/S/T, 108A/C/E, 109E/G/L/P/R/S/T, 111A/G/L, 112I/L, 113G/S, 116M, 119C/G/M/Q/R/S/T/V, 120C, 121F/H/L/M/Q, 126A/L/S, 128F/V/W, 129A/G/S, 130A, 133A/L, 134H, 136F/H, 141S, 144Q/S, 146C/I, 147A/N/S, 151L, 152A/C, 155A/I/N/T/V/W, 156Y, 157P, 160L, 162F, 163G, 164A/G/K/Q/S/W, 167F/T/V/W, 168R/V, 169A/C/D/I/L/M/S, 170D/H/K/M/R/S/V, 171C/V, 172S, 177V, 179N, 180Q, 181A/C/L/M/V, 182G, 183M/S/V, 185S/T, 187H/Q/S/V, 188T, 190I, 191A/R/S/W, 192L, 194A/R, 195G/M/T/V, 196S, 197R, 202F, 206A/H, 207A/L/M/R/T/V, 208V, 210E/L, 211A/C/F/H/I/K/L/M/T/W, 211R, 212A, 215L, 216V, 217A/V, 218D/L/N/R/V, 221A, 222A/G/M/Q, 225E/G, 229C/H/V, 231L/M/V, 232S, 233A/S/V, 234A/M/N/R/V/Y, 236C/S/V, 237K/I/L/M/Q/V, 238L, 239A/F/G/H/I/M/Q/R/T/W, 240L/V, 241R, 242D/T, 243F/G/R/Y, 244R/W, 245F/Q/W, 246A/T/D/R/S/T/V, 247L, 248E/G/K/L/R/V, 249A/G/I/L/M/R/S, 250H/I/M/T, 251H/K/L/T/V, 252A/C/G/K/T/V, 253D/E/G/H/K/L/P/S/T/V, 254I/L/M/P/Q/T, 255A/C/E/G/I/K/S/W, 256C/H/M, 258R/S/V, 265Y, 271W, 274R, 275S, 276D/E/G/S, 287A/S/V/Y, 288V, 291G, 292F/I/K/V, 293M, 294L, 295A, 296N, 299G/S, 303D/F/H/M/S/V/W, 305S/T, 307F/G, 308D/F/L/V, 310A/C, 311E/F/G/L/M/Q/R/S/T, 312R, 314Q/S/V, 315S, 316A/D/E/I/K/S/Y, 317M/W/Y, or 320G/R/S, or combinations thereof, wherein the amino acid positions are relative to the reference sequence corresponding to amino acid residues 12-321 of SEQ ID NO: 90, 254, 370, 734, 896, 1196, 1366, 1382, 1464, 1568, 1616, 1668, 1766, 1826, 1918, or 1942, or relative to the reference sequence corresponding to SEQ ID NO: 90, 254, 370, 734, 896, 1196, 1366, 1382, 1464, 1568, 1616, 1668, 1766, 1826, 1918, or 1942.

[0260] In some embodiments, the amino acid sequence of the engineered adenosine kinase comprises at least a substitution at amino acid position 24, 27, 31, 40, 43, 51, 52, 74, 77, 79, 109, 113, 119, 121, 126, 129, 169, 181, 185, 207, 211, 233,234, 237, 239, 244, 246, 249, 251, 252, 253, 276, 299, 305, 312, or 316, or combinations thereof, wherein the amino acid positions are relative to the reference sequence corresponding to amino acid residues 12-321 of SEQ ID NO: 90, 254, 370, 734, 896, 1196, 1366, 1382, 1464, 1568, 1616, 1668, 1766, 1826, 1918, or 1942, or relative to the reference sequence corresponding to SEQ ID NO: 90, 254, 370, 734, 896, 1196, 1366, 1382, 1464, 1568, 1616, 1668, 1766, 1826, 1918, or 1942.

[0261] In some embodiments, the amino acid sequence of the engineered adenosine kinase comprises at least a substitution or amino acid residue 241/N/V, 27A/C/G/K/P/R/S/W, 31F/H/L/R/W/Y, 40H/M/R/W, 43E/K/R/S/V, 51F/G/S, 52C/D/F/G/S/T, 74F/I/K/R/T/V, 77V, 79A, 109E/G/L/P/R/S/T, 113G/S, 119C/G/M/Q/R/S/T/V, 121F/H/L/M/Q, 126A/L/S, 129A/G/S, 169A/C/D/I/L/M/S, 181A/C/L/M/V, 185S/T, 207A/L/M/R/T/V, 211A/C/F/H/I/K/L/M/T/W, 233A/S/V, 234A/M/N/R/V/Y, 237K/I/L/M/Q/V, 239A/F/G/H/I/M/Q/R/T/W, 244R/W, 246A/D/R/S/T/V, 249A/G/I/L/M/R/S, 251H/K/L/T/V, 252A/C/G/K/T/V, 253D/E/G/H/K/L/P/S/T/V, 276D/E/G/S, 299G/S, 305S/T, 312R, or 316A/D/E/I/K/S/Y, or combinations thereof, wherein the amino acid positions are relative to the reference sequence corresponding to amino acid residues 12-321 of SEQ ID NO: 90, 254, 370, 734, 896, 1196, 1366, 1382, 1464, 1568, 1616, 1668, 1766, 1826, 1918, or 1942, or relative to the reference sequence corresponding to SEQ ID NO: 90, 254, 370, 734, 896, 1196, 1366, 1382, 1464, 1568, 1616, 1668, 1766, 1826, 1918, or 1942.

[0262] In some embodiments, the amino acid sequence of the engineered adenosine kinase comprises at least a substitution or amino acid residue 24N, 27W, 31Y, 40R, 43R, 51F, 52D, 74R, 77V, 79A, 109S, 113G, 119M, 121H/Q, 126L, 129G/S, 169M, 181L/V, 185S, 207R, 211A/T, 233S, 234A, 237V, 239M, 244R, 246V, 249A, 251K, 252A/T, 253S, 276E, 299G, 305T, 312R, or 316D/Y, or combinations thereof, wherein the amino acid positions are relative to the reference sequence corresponding to amino acid residues 12-321 of SEQ ID NO: 90, 254, 370, 734, 896, 1196, 1366, 1382, 1464, 1568, 1616, 1668, 1766, 1826, 1918, or 1942, or relative to the reference sequence corresponding to SEQ ID NO: 90, 254, 370, 734, 896, 1196, 1366, 1382, 1464, 1568, 1616, 1668, 1766, 1826, 1918, or 1942.

[0263] In some embodiments, the engineered adenosine kinase comprises an amino acid sequence having at least 70%, 75%, 80%, 81%, 82%, 83%, 84%, 85%, 86%, 87%, 88%, 89%, 90%, 91%, 92%, 93%, 94%, 95%, 96%, 97%, 98%, 99%, or more sequence identity to the reference sequence corresponding to residues 12-321 of SEQ ID NO: 90, or to the reference sequence corresponding to SEQ ID NO: 90, wherein the amino acid sequence comprises one or more substitutions relative to the reference sequence corresponding to residues 12-321 of SEQ ID NO: 90, or relative to the reference sequence corresponding to SEQ ID NO: 90.

[0264] In some embodiments, the engineered adenosine kinase comprises an amino acid sequence having at least 70%, 75%, 80%, 81%, 82%, 83%, 84%, 85%, 86%, 87%, 88%, 89%, 90%, 91%, 92%, 93%, 94%, 95%, 96%, 97%, 98%, 99%, or more sequence identity to the reference sequence corresponding to residues 12-321 of an even-numbered SEQ ID NO. of SEQ ID NOs: 148-358, or to the reference sequence corresponding to an even-numbered SEQ ID NO. of SEQ ID NOs: 148-358, wherein the amino acid sequence comprises one or more substitutions relative to the reference sequence corresponding to residues 12-321 of SEQ ID NO: 90, or relative to the reference sequence corresponding to SEQ ID NO: 90.

[0265] In some embodiments, the amino acid sequence of the engineered adenosine kinase comprises at least a substitution or substitution set at amino acid position(s) 111/233/316, 43/111/233/316, 109/181/316, 109/316, 111/233, 109/233/316, 38/208/211/308, 111/181/233/316, 109/111/233/316, 111/181/233/239/316, 111/233/239/316, 109/111/181/233/316, 111/181/316, 43/233, 109/111/316, 181/233, 34/211/248/249, 34/38/248/249, 34/308, 233/316, 43/233/316, 181/316, 34/249, 43/181/233/316, 34/38/103/116/253, 34, 40/43/109/181/233/316, 34/38/208/253, 103/249/253/308, 34/38/116/208, 38/249, 34/38/116/211/248/253/308, 43/109/316, 116/253, 43/111/181/316, 34/38/308, 109/111/181, 111/130/233, 233, 34/38/116/308, 109/233, 40/43/109/111/181/233/316, 109/130/181/233, 34/38/253, 253, 34/38/103/208/249, 103/208/210/253, 130/181/233/316, 109/111/130/181/233, 34/38/210/211/253/303, 103/116/208, 34/116/248/252/253, 34/38/103/210/211/249, 40/233/316, 34/38, 109/130/233, 111/130/181/233/316, 34/38/249/253, 34/38/208/248, 40/109/111/181/233/316, 130/316, 40/316, 38/116, 34/38/116, 38/116/208/210/249/253, 40/130/181/233/316, 103/248/249, or 103/248, wherein the amino acid positions are relative to the reference sequence corresponding to residues 12-321 of SEQ ID NO: 90, or relative to the reference sequence corresponding to SEQ ID NO: 90.

[0266] In some embodiments, the amino acid sequence of the engineered adenosine kinase comprises at least a substitution or substitution set, or amino acid residue(s) 111A/233S/316S, 111A/233S/316E, 43R/111A/233S/316S, 109S/181L/316S, 109S/316E, 111A/233S, 109S/233S/316E, 38C/208V/211T/308F, 111A/181L/233S/316S, 109S/111A/233S/316S, 111A/181L/233S/239Q/316S, 111A/233S/239Q/316S, 109S/111A/181L/233S/316S, 111A/181L/316E, 43R/233S, 109S/111A/316S, 181L/233S, 34K/211T/248R/249G, 34K/38C/248R/249G, 34K/308F, 233S/316E, 43R/233S/316D, 181L/316S, 34R/249G, 43R/233S/316S, 43R/181L/233S/316S, 34R/38C/103R/116M/253P, 34K, 40R/43R/109S/181L/233S/316D, 34R/38C/208V/253P, 103R/249G/253P/308F, 34R/38C/116M/208V, 38C/249G, 34K/38C/116M/211T/248R/253P/308L, 43R/109S/316S, 116M/253P, 109S/111A/233S/316D, 43R/111A/181L/316E, 34R/38C/308F, 109S/111A/181L, 111A/130A/233S, 233S, 34R/38C/116M/308F, 109S/233S, 40R/43R/109S/111A/181L/233S/316S, 109S/130A/181L/233S, 34K/38C/253P, 253P, 34R/38C/103R/208V/249S, 103R/208V/210E/253P, 130A/181L/233S/316D, 109S/111A/130A/181L/233S, 34R/38C/210E/211T/253P/303H, 103R/116M/208V, 34R/116M/248R/252K/253P, 34R/38C/103R/210E/211T/249G, 40R/233S/316S, 34R/38C, 109S/130A/233S, 111A/130A/181L/233S/316S, 34K/38C/249G/253P, 34K/38C/208V/248R, 40R/109S/111A/181L/233S/316S, 130A/316S, 40R/316S, 38C/116M, 34K/38C/116M, 38C/116M/208V/210E/249G/253P, 40R/130A/181L/233S/316D, 34R/38C/116M, 34R/38C/253P, 130A/316D, 103R/248R/249G, or 103R/248R, wherein the amino acid positions are relative to the reference sequence corresponding to residues 12-321 of SEQ ID NO: 90, or relative to the reference sequence corresponding to SEQ ID NO: 90.

[0267] In some embodiments, the amino acid sequence of the engineered adenosine kinase comprises at least a substitution or substitution set P111A/P233S/Q316S, P111A/P233S/Q316E, 143R/P111A/P233S/Q316S, F109S/M181L/Q316S, F109S/Q316E, P111A/P233S, F109S/P233S/Q316E, P38C/L208V/E211T/E308F, P111A/M181L/P233S/Q316S, F109S/P111A/P233S/Q316S, P111A/M181L/P233S/H239Q/Q316S, P111A/P233S/H239Q/Q316S, F109S/P111A/M181L/P233S/Q316S, P111A/M181L/Q316E, I43R/P233S, F109S/P111A/Q316S, M181L/P233S, N34K/E211T/P248R/P249G, N34K/P38C/P248R/P249G, N34K/E308F, P233S/Q316E, I43R/P233S/Q316D, M181L/Q316S, N34R/P249G, I43R/P233S/Q316S, I43R/M181L/P233S/Q316S, N34R/P38C/K103R/T116M/R253P, N34K, K40R/I43R/F109S/M181L/P233S/Q316D, N34R/P38C/L208V/R253P, K103R/P249G/R253P/E308F, N34R/P38C/T116M/L208V, P38C/P249G, N34K/P38C/T116M/E211T/P248R/R253P/E308L, I43R/F109S/Q316S, T116M/R253P, F109S/P111A/P233S/Q316D, 143R/P111A/M181L/Q316E, N34R/P38C/E308F, F109S/P111A/M181L, P111A/G130A/P233S, P233S, N34R/P38C/T116M/E308F, F109S/P233S, K40R/I43R/F109S/P111A/M181L/P233S/Q316S, F109S/G130A/M181L/P233S, N34K/P38C/R253P, R253P, N34R/P38C/K103R/L208V/P249S, K103R/L208V/Q210E/R253P, G130A/M181L/P233S/Q316D, F109S/P111A/G130A/M181L/P233S, N34R/P38C/Q210E/E211T/R253P/R303H, K103R/T116M/L208V, N34R/T116M/P248R/E252K/R253P, N34R/P38C/K103R/Q210E/E211T/P249G, K40R/P233S/Q316S, N34R/P38C, F109S/G130A/P233S, P111A/G130A/M181L/P233S/Q316S, N34K/P38C/P249G/R253P, N34K/P38C/L208V/P248R, K40R/F109S/P111A/M181L/P233S/Q316S, G130A/Q316S, K40R/Q316S, P38C/T116M, N34K/P38C/T116M, P38C/T116M/L208V/Q210E/P249G/R253P, K40R/G130A/M181L/P233S/Q316D, N34R/P38C/T116M, N34R/P38C/R253P, G130A/Q316D, K103R/P248R/P249G, K103R/P248R, wherein the amino acid positions are relative to the reference sequence corresponding to residues 12-321 of SEQ ID NO: 90, or relative to the reference sequence corresponding to SEQ ID NO: 90.

[0268] In some embodiments, the engineered adenosine kinase comprises an amino acid sequence having at least 70%, 75%, 80%, 81%, 82%, 83%, 84%, 85%, 86%, 87%, 88%, 89%, 90%, 91%, 92%, 93%, 94%, 95%, 96%, 97%, 98%, 99%, or more sequence identity to the reference sequence corresponding to residues 12-321 of SEQ ID NO: 254, or to the reference sequence corresponding to SEQ ID NO: 254, wherein the amino acid sequence comprises one or more substitutions relative to the reference sequence corresponding to residues 12-321 of SEQ ID NO: 254, or relative to the reference sequence corresponding to SEQ ID NO: 254.

[0269] In some embodiments, the engineered adenosine kinase comprises an amino acid sequence having at least 70%, 75%, 80%, 81%, 82%, 83%, 84%, 85%, 86%, 87%, 88%, 89%, 90%, 91%, 92%, 93%, 94%, 95%, 96%, 97%, 98%, 99%, or more sequence identity to the reference sequence corresponding to residues 12-321 of an even-numbered SEQ ID NO. of SEQ ID NOs: 360-592, or to the reference sequence corresponding to an even-numbered SEQ ID NO. of SEQ ID NOs: 360-592, wherein the amino acid sequence comprises one or more substitutions relative to the reference sequence corresponding to residues 12-321 of SEQ ID NO: 254, or relative to the reference sequence corresponding to SEQ ID NO: 254.

[0270] In some embodiments, the amino acid sequence of the engineered adenosine kinase comprises at least a substitution or substitution set at amino acid position(s) 77/111/170/211/236, 77/111/211, 77/211, 53/77/170/211/320, 53/77/211/234/320, 77/79/211/316, 77/111/234/236/308, 111/170/211/234/236/248, 111/169/170/234/236/248, 77/211/248/320, 53/169/170/234/320, 111/211/234/236/248, 77, 53/77/111/170/248, 211/234/248, 77/86/170/211/234/308/320, 77/86, 53/111/170, 77/79/111, 53/77/111/169/236, 77/211/234, 211, 53/77, 86/169/234, 53/211/234/248, 111/169/170/236/248, 77/79/211, 77/79/169/170, 77/79/86/169/236, 79/211/248, 79/211, 53/86/211/234/236, 79/170/211, 308, 53/211, 169/234/236, 77/79/169/234/236, 53/77/79, 77/111, 53/234/236, 169/170, 53/77/79/169, 53/86/234/236, 53/169/234/236, 53/234, 77/79/86/170/211/234/236/308/320, 53/170, 77/248, 53/86, 252, 180, 129, 121, 255, 119, 256, 237, 249, 20, 234, 254, 56, 287, 317, 299, 229, 250, 295, 144/255, 291, 181, 233, 248, 231, 251, 128, 156, 247, 288, or 292, wherein the amino acid positions are relative to the reference sequence corresponding to residues 12-321 of SEQ ID NO: 254, or relative to the reference sequence corresponding to SEQ ID NO: 254.

[0271] In some embodiments, the amino acid sequence of the engineered adenosine kinase comprises at least a substitution or substitution set, or amino acid residue(s) 77V/111A/170D/211T/236V, 77V/111A/211T, 77V/211T, 53L/77V/170D/211T/320S, 53L/77V/211T/234R/320S, 77V/79A/211T/316Y, 77V/111A/234R/236V/308L, 111A/170D/211T/234R/236V/248R, 111A/169A/170D/234R/236V/248R, 77V/211T/248R/320S, 53L/169A/170D/234R/320S, 111A/211T/234R/236V/248R, 77V, 53L/77V/111A/170D/248R, 211T/234R/248R, 77V/86Q/170D/211T/234R/308L/320S, 77V/86Q, 53L/111A/170D, 77V/79A/111A, 53L/77V/111A/169A/236V, 77V/211T/234R, 211T, 53L/77V, 86Q/169A/234R, 53L/211T/234R/248R, 111A/169A/170D/236V/248R, 77V/79A/211T, 77V/79A/169A/170D, 77V/79A/86Q/169A/236V, 79A/211T/248R, 79A/21 IT, 53L/86Q/211T/234R/236V, 79A/170D/211T, 308L, 53L/21 IT, 169A/234R/236V, 77V/79A/169A/234R/236V, 53L/77V/79A, 77V/111A, 53L/234R/236V, 169A/170D, 53L/77V/79A/169A, 53L/86Q/234R/236V, 53L/169A/234R/236V, 53L/234R, 77V/79A/86Q/170D/211T/234R/236V/308L/320S, 53L/170D, 77V/248R, 53L/86Q, 252T, 180Q, 129G, 121M, 255A, 255S, 121L, 255E, 119M, 256C, 255G, 237I, 249L, 20F, 255K, 237V, 234A, 254Q, 256M, 56Y, 56F, 249M, 119T, 287V, 121F, 119S, 252K, 56G, 317W, 119V, 299S, 229C, 119C, 250I, 254L, 234M, 229V, 234Y, 287Y, 295A, 144Q/255W, 119Q, 291G, 250T, 181M, 287S, 119R, 317Y, 119G, 250M, 249G, 249I, 20V, 237M, 233A, 248G, 231V, 251L, 128F, 287A, 181V, 156Y, 247L, 288V, 292K, 181A, 249R, or 250H, wherein the amino acid positions are relative to the reference sequence corresponding to residues 12-321 of SEQ ID NO: 254, or relative to the reference sequence corresponding to SEQ ID NO: 254.

[0272] In some embodiments, the amino acid sequence of the engineered adenosine kinase comprises at least a substitution or substitution set P77V/P111A/G170D/E211T/A236V, P77V/P111A/E211T, P77V/E211T, M53L/P77V/G170D/E211T/A320S, M53L/P77V/E211T/K234R/A320S, P77V/G79A/E211T/D316Y, P77V/P111A/K234R/A236V/E308L, P111A/G170D/E211T/K234R/A236V/P248R, P111A/G169A/G170D/K234R/A236V/P248R, P77V/E211T/P248R/A320S, M53L/G169A/G170D/K234R/A320S, P111A/E211T/K234R/A236V/P248R, P77V, M53L/P77V/P111A/G170D/P248R, E211T/K234R/P248R, P77V/G86Q/G170D/E211T/K234R/E308L/A320S, P77V/G86Q, M53L/P111A/G170D, P77V/G79A/P111A, M53L/P77V/P111A/G169A/A236V, P77V/E211T/K234R, E211T, M53L/P77V, G86Q/G169A/K234R, M53L/E211T/K234R/P248R, P111A/G169A/G170D/A236V/P248R, P77V/G79A/E211T, P77V/G79A/G169A/G170D, P77V/G79A/G86Q/G169A/A236V, G79A/E211T/P248R, G79A/E211T, M53L/G86Q/E211T/K234R/A236V, G79A/G170D/E211T, E308L, M53L/E211T, G169A/K234R/A236V, P77V/G79A/G169A/K234R/A236V, M53L/P77V/G79A, P77V/P111A, M53L/K234R/A236V, G169A/G170D, M53L/P77V/G79A/G169A, M53L/G86Q/K234R/A236V, M53L/G169A/K234R/A236V, M53L/K234R, P77V/G79A/G86Q/G170D/E211T/K234R/A236V/E308L/A320S, M53L/G170D, P77V/P248R, M53L/G86Q, E252T, A180Q, P129G, H121M, V255A, V255S, H121L, V255E, H119M, V256C, V255G, L237I, P249L, L20F, V255K, L237V, K234A, R254Q, V256M, E56Y, E56F, P249M, H119T, N287V, H121F, H119S, E252K, E56G, F317W, H119V, T299S, T229C, H119C, A250I, R254L, K234M, T229V, K234Y, N287Y, E295A, P144Q/V255W, H119Q, A291G, A250T, L181M, N287S, H119R, F317Y, H119G, A250M, P249G, P249I, L20V, L237M, S233A, P248G, Q231V, H251L, H128F, N287A, L181V, R156Y, I247L, L288V, L292K, L181A, P249R, or A250H, wherein the amino acid positions are relative to the reference sequence corresponding to residues 12-321 of SEQ ID NO: 254, or relative to the reference sequence corresponding to SEQ ID NO: 254.

[0273] In some embodiments, the engineered adenosine kinase comprises an amino acid sequence having at least 70%, 75%, 80%, 81%, 82%, 83%, 84%, 85%, 86%, 87%, 88%, 89%, 90%, 91%, 92%, 93%, 94%, 95%, 96%, 97%, 98%, 99%, or more sequence identity to the reference sequence corresponding to residues 12-321 of SEQ ID NO: 370, or to the reference sequence corresponding to SEQ ID NO: 370, wherein the amino acid sequence comprises one or more substitutions relative to the reference sequence corresponding to residues 12-321 of SEQ ID NO: 370, or relative to the reference sequence corresponding to SEQ ID NO: 370.

[0274] In some embodiments, the engineered adenosine kinase comprises an amino acid sequence having at least 70%, 75%, 80%, 81%, 82%, 83%, 84%, 85%, 86%, 87%, 88%, 89%, 90%, 91%, 92%, 93%, 94%, 95%, 96%, 97%, 98%, 99%, or more sequence identity to the reference sequence corresponding to residues 12-321 of an even-numbered SEQ ID NO. of SEQ ID NOs: 594-888, or to the reference sequence corresponding to an even-numbered SEQ ID NO. of SEQ ID NOs: 594-888, wherein the amino acid sequence comprises one or more substitutions relative to the reference sequence corresponding to residues 12-321 of SEQ ID NO: 370, or relative to the reference sequence corresponding to SEQ ID NO: 370.

[0275] In some embodiments, the amino acid sequence of the engineered adenosine kinase comprises at least a substitution or substitution set at amino acid position(s) 299, 21, 113, 152, 169/255, 251, 294, 255, 202/211, 31, 129, 252, 27/64, 128, 248, 234, 288, 20, 111, 112, 181, 119, 64, 155, 256, 254, 292, 265, 177, 232, 120, 183, 234/252, 181/250/252/299, 119/181/234/250/299, 129/234/252, 119/129/234, 119/181/234/250/256/299, 119/181/250/252, 119/181/234/299, 234/250/252, 119/181/252/299, 129/181/234/299, 56/121/229, 181/255/299, 119/299, 119/250/255/299, 80/119/252, 119/129, 119/129/250, 181/234/252/299, 181/250/299, 252/299, 119/181/299, 119/129/299, 119/129/234/252, 119/129/234/250/299, 119/181/234/252, 129/234/255/299, 181/299, 250/252, 250/255/299, 119/234/299, 119/181/250, 56/237, 250/299, 119/234/255/256/299, 56/229/254, 119/129/181, 56/121/295/317, 119/181/250/255/256, 229, 250, 119/234, 20/229/237/317, 181/250, 119/255, 121/156/229, 56/121/237, 237/317, 56/295, 56/121/229/236/254/295, 56/254, 119/250/299, 229/237/295, 20/229/317, 229/295, 156/229, 56/121/229/237/295, 237/254, 20/56, 56/156, 56/156/254/295, 20/56/229, 119/129/181/234, 237, 56/156/229/237, 20/56/102/229, 119/181/234, 20/229, 56/121/156/237, 56/156/229, 20/56/156/229/237/295, 20/56/121/237/317, 156, 156/237/295, 20/56/121, 119/181, 20/56/229/254, 56, 121/254, 20/295, 255/256, 56/121/229/254, or 119/129/234/255/256, wherein the amino acid positions are relative to the reference sequence corresponding to residues 12-321 of SEQ ID NO: 370, or relative to the reference sequence corresponding to SEQ ID NO: 370.

[0276] In some embodiments, the amino acid sequence of the engineered adenosine kinase comprises at least a substitution or substitution set, or amino acid residue(s) 299G, 21G, 299S, 113S, 152C, 169D/255C, 251K, 294L, 255S, 202F/211A, 31L, 129A, 252V, 27A/64M, 128W, 248L, 251V, 234V, 288V, 20V, 1I1L, 112L, 181C, 119C, 64T, 251T, 155W, 256H, 128F, 254I, 248G, 292F, 252C, 234N, 181A, 31W, 265Y, 251L, 152A, 234M, 177V, 232S, 120C, 31F, 183M, 234A/252T, 181V/250I/252T/299S, 119R/181V/234A/250I/299S, 129G/234A/252T, 119M/129G/234A, 119M/181V/234A/250I/256M/299S, 119R/181V/250I/252T, 119M/181V/234A/299S, 234A/250I/252T, 119R/181V/252T/299S, 129G/181V/234A/299S, 56G/121L/229V, 181V/255A/299S, 119M/299S, 119R/250I/255K/299S, 119R/181V/234A/299S, 252T, 80M/119M/252T, 119M/129G, 119M/129G/250I, 181V/234A/252T/299S, 181V/250I/299S, 252T/299S, 119M/181V/299S, 119R/129G/299S, 119M/129G/234A/252T, 119M/129G/234A/250I/299S, 119M/181V/234A/252T, 129G/234A/255K/299S, 181V/299S, 250I/252T, 250I/255K/299S, 119R/181V/299S, 119M/234A/299S, 119R/299S, 119M/181V/250I, 129G, 56G/237V, 250I/299S, 119M/234A/255K/256M/299S, 56G/229V/254L, 119R/129G/181V, 56G/121M/295A/317Y, 119R/181V/250I/255A/256M, 229V, 250I, 119M, 119M/234A, 20F/229V/237V/317Y, 181V/250I, 119M/255K, 121M/156Y/229V, 56G/121M/237V, 237V/317Y, 56G/295A, 56G/121M/229V/236S/254L/295A, 56G/254L, 119R/250I/299S, 229V/237V/295A, 20F/229V/317Y, 234A, 119R/234A, 254L, 229V/295A, 156Y/229V, 56F/121M/229V/237V/295A, 56F/237V, 237V/254L, 299S, 20F/56G, 56G/156Y, 56G/156Y/254L/295A, 20F/56G/229V, 119M/129G/181V/234A, 237V, 20F, 56F/156Y/229V/237V, 56F/254L, 20F/56G/102I/229V, 20F/56F, 256M, 119M/181V/234A, 20F/229V, 56F/121M/156Y/237V, 56F/156Y/229V, 20F/56G/156Y/229V/237V/295A, 56F/229V/254L, 20F/56F/121M/237V/317Y, 20F/56F/229V, 119R/181V/234A, 119R, 156Y, 156Y/237V/295A, 20F/56F/121M, 119M/181V, 20F/56G/229V/254L, 56F, 121M/254L, 20F/295A, 255K/256M, 56F/121M/229V/254L, 119M/129G/234A/255A/256M, or 119R/181V, wherein the amino acid positions are relative to the reference sequence corresponding to residues 12-321 of SEQ ID NO: 370, or relative to the reference sequence corresponding to SEQ ID NO: 370.

[0277] In some embodiments, the amino acid sequence of the engineered adenosine kinase comprises at least a substitution or substitution set T299G, A21G, T299S, A113S, G152C, G169D/V255C, H251K, V294L, V255S, N202F/T211A, Q31L, P129A, E252V, V27A/I64M, H128W, P248L, H251V, K234V, L288V, L20V, P1I1L, Q112L, L181C, H119C, I64T, H251T, G155W, V256H, H128F, R254I, P248G, L292F, E252C, K234N, L181A, Q31W, F265Y, H251L, G152A, K234M, P177V, G232S, D120C, Q31F, L183M, K234A/E252T, L181V/A250I/E252T/T299S, H119R/L181V/K234A/A250I/T299S, P129G/K234A/E252T, H119M/P129G/K234A, H119M/L181V/K234A/A250I/V256M/T299S, H119R/L181V/A250I/E252T, H119M/L181V/K234A/T299S, K234A/A250I/E252T, H119R/L181V/E252T/T299S, P129G/L181V/K234A/T299S, E56G/H121L/T229V, L181V/V255A/T299S, H119M/T299S, H119R/A250I/V255K/T299S, H119R/L181V/K234A/T299S, E252T, T80M/H119M/E252T, H119M/P129G, H119M/P129G/A250I, L181V/K234A/E252T/T299S, L181V/A250I/T299S, E252T/T299S, H119M/L181V/T299S, H119R/P129G/T299S, H119M/P129G/K234A/E252T, H119M/P129G/K234A/A250I/T299S, H119M/L181V/K234A/E252T, P129G/K234A/V255K/T299S, L181V/T299S, A250I/E252T, A250I/V255K/T299S, H119R/L181V/T299S, H119M/K234A/T299S, H119R/T299S, H119M/L181V/A250I, P129G, E56G/L237V, A250I/T299S, H119M/K234A/V255K/V256M/T299S, E56G/T229V/R254L, H119R/P129G/L181V, E56G/H121M/E295A/F317Y, H119R/L181V/A250I/V255A/V256M, T229V, A250I, H119M, H119M/K234A, L20F/T229V/L237V/F317Y, L181V/A250I, H119M/V255K, H121M/R156Y/T229V, E56G/H121M/L237V, L237V/F317Y, E56G/E295A, E56G/H121M/T229V/A236S/R254L/E295A, E56G/R254L, H119R/A250I/T299S, T229V/L237V/E295A, L20F/T229V/F317Y, K234A, H119R/K234A, R254L, T229V/E295A, R156Y/T229V, E56F/H121M/T229V/L237V/E295A, E56F/L237V, L237V/R254L, T299S, L20F/E56G, E56G/R156Y, E56G/R156Y/R254L/E295A, L20F/E56G/T229V, H119M/P129G/L181V/K234A, L237V, L20F, E56F/R156Y/T229V/L237V, E56F/R254L, L20F/E56G/V102I/T229V, L20F/E56F, V256M, H119M/L181V/K234A, L20F/T229V, E56F/H121M/R156Y/L237V, E56F/R156Y/T229V, L20F/E56G/R156Y/T229V/L237V/E295A, E56F/T229V/R254L, L20F/E56F/H121M/L237V/F317Y, L20F/E56F/T229V, H119R/L181V/K234A, H119R, R156Y, R156Y/L237V/E295A, L20F/E56F/H121M, H119M/L181V, L20F/E56G/T229V/R254L, E56F, H121M/R254L, L20F/E295A, V255K/V256M, E56F/H121M/T229V/R254L, H119M/P129G/K234A/V255A/V256M, or H119R/L181V, wherein the amino acid positions are relative to the reference sequence corresponding to residues 12-321 of SEQ ID NO: 370, or relative to the reference sequence corresponding to SEQ ID NO: 370.

[0278] In some embodiments, the engineered adenosine kinase comprises an amino acid sequence having at least 70%, 75%, 80%, 81%, 82%, 83%, 84%, 85%, 86%, 87%, 88%, 89%, 90%, 91%, 92%, 93%, 94%, 95%, 96%, 97%, 98%, 99%, or more sequence identity to the reference sequence corresponding to residues 12-321 of SEQ ID NO: 734, or to the reference sequence corresponding to SEQ ID NO: 734, wherein the amino acid sequence comprises one or more substitutions relative to the reference sequence corresponding to residues 12-321 of SEQ ID NO: 734, or relative to the reference sequence corresponding to SEQ ID NO: 734.

[0279] In some embodiments, the engineered adenosine kinase comprises an amino acid sequence having at least 70%, 75%, 80%, 81%, 82%, 83%, 84%, 85%, 86%, 87%, 88%, 89%, 90%, 91%, 92%, 93%, 94%, 95%, 96%, 97%, 98%, 99%, or more sequence identity to the reference sequence corresponding to residues 12-321 of an even-numbered SEQ ID NO. of SEQ ID NOs: 890-1142, 1192 and 1194, or to the reference sequence corresponding to an even-numbered SEQ ID NO. of SEQ ID NOs: 890-1142, 1192 and 1194, wherein the amino acid sequence comprises one or more substitutions relative to the reference sequence corresponding to residues 12-321 of SEQ ID NO: 734, or relative to the reference sequence corresponding to SEQ ID NO: 734.

[0280] In some embodiments, the amino acid sequence of the engineered adenosine kinase comprises at least a substitution or substitution set at amino acid position(s) 56/229, 21/56, 181, 181/211/251, 181/211, 21/121/299, 229, 56, 56/169, 311, 52, 170, 31/181/211, 167, 303, 222, 43, 83, 113/181/211, 251, 187, 218, 181/251, 195, 121/229, 107, 141, 31/181, 307, 100, 169, 86, 90, 164, 310, 276, 35, 56/134, 211, 50, 41, 121/169/229, 74, 225, 106, 121, 31/113/181, 191, 190, 171, 168, 31/181/211/294, 73, 31/251, 31, 196, 89, 197, 242, 51, 103, 101, 147, 40, 146, 243, 56/121/229, or 31/211, wherein the amino acid positions are relative to the reference sequence corresponding to residues 12-321 of SEQ ID NO: 734, or relative to the reference sequence corresponding to SEQ ID NO: 734.

[0281] In some embodiments, the amino acid sequence of the engineered adenosine kinase comprises at least a substitution or substitution set, or amino acid residue(s) 56G/229V, 21G/56G, 181V, 181V/211A/251K, 181V/211A, 21G/121L/299S, 229V, 56G, 56G/169D, 311Q, 52D, 170R, 31L/181V/211A, 167W, 170H, 303M, 222G, 43V, 83V, 113S/181V/211A, 251K, 187V, 218V, 181V/251K, 195T, 121L/229V, 107H, 141S, 31L/181V, 307F, 100G, 169L, 169M, 52G, 86L, 90L, 311G, 164W, 310C, 167F, 276E, 35V, 56G/134H, 211M, 211M, 170V, 50C, 41L, 311S, 121L/169D/229V, 74I, 225G, 106G, 121L, 31L/113S/181V, 191A, 191S, 211I, 35S, 190I, 164K, 171C, 211F, 211L, 225E, 195G, 311R, 167V, 311L, 168V, 168R, 211C, 31L/181V/211A/294L, 73M, 276S, 74V, 164S, 31L/251K, 169S, 31L, 169D, 196S, 196S, 52C, 218L, 169C, 89G, 90R, 73E, 73E, 167T, 197R, 242D, 51S, 103L, 191R, 101F, 83T, 52F, 164G, 195M, 43K, 147S, 187Q, 311M, 40W, 169I, 242T, 101W, 83L, 222M, 170S, 311F, 146I, 83S, 243R, 74T, 311T, 218N, 74F, 303V, 83F, 90V, 74K, 303F, 310A, 243G, 222A, 43S, 303W, 56G/121L/229V, or 31L/211A, wherein the amino acid positions are relative to the reference sequence corresponding to residues 12-321 of SEQ ID NO: 734, or relative to the reference sequence corresponding to SEQ ID NO: 734.

[0282] In some embodiments, the amino acid sequence of the engineered adenosine kinase comprises at least a substitution or substitution set E56G/T229V, A21G/E56G, L181V, L181V/T211A/H251K, L181V/T211A, A21G/H121L/T299S, T229V, E56G, E56G/G169D, D311Q, R52D, G170R, Q31L/L181V/T211A, A167W, G170H, R303M, S222G, R43V, Q83V, A113S/L181V/T211A, H251K, P187V, Q218V, L181V/H251K, Q195T, H121L/T229V, D107H, R141S, Q31L/L181V, A307F, S100G, G169L, G169M, R52G, G86L, E90L, D311G, E164W, N310C, A167F, N276E, H35V, E56G/R134H, T211M, T211M, G170V, V50C, V41L, D311S, H121L/G169D/T229V, A74I, Q225G, D106G, H121L, Q31L/A113S/L181V, E191A, E191S, T211I, H35S, R190I, E164K, 1171C, T211F, T211L, Q225E, Q195G, D311R, A167V, D311L, A168V, A168R, T211C, Q31L/L181V/T211A/V294L, G73M, N276S, A74V, E164S, Q31L/H251K, G169S, Q31L, G169D, A196S, A196S, R52C, Q218L, G169C, R89G, E90R, G73E, G73E, A167T, D197R, E242D, P51S, K103L, E191R, R101F, Q83T, R52F, E164G, Q195M, R43K, T147S, P187Q, D311M, R40W, G169I, E242T, R101W, Q83L, S222M, G170S, D311F, V146I, Q83S, K243R, A74T, D311T, Q218N, A74F, R303V, Q83F, E90V, A74K, R303F, N310A, K243G, S222A, R43S, R303W, E56G/H121L/T229V, or Q31L/T211A, wherein the amino acid positions are relative to the reference sequence corresponding to residues 12-321 of SEQ ID NO: 734, or relative to the reference sequence corresponding to SEQ ID NO: 734.

[0283] In some embodiments, the engineered adenosine kinase comprises an amino acid sequence having at least 70%, 75%, 80%, 81%, 82%, 83%, 84%, 85%, 86%, 87%, 88%, 89%, 90%, 91%, 92%, 93%, 94%, 95%, 96%, 97%, 98%, 99%, or more sequence identity to the reference sequence corresponding to residues 12-321 of SEQ ID NO: 896, or to the reference sequence corresponding to SEQ ID NO: 896, wherein the amino acid sequence comprises one or more substitutions relative to the reference sequence corresponding to residues 12-321 of SEQ ID NO: 896, or relative to the reference sequence corresponding to SEQ ID NO: 896.

[0284] In some embodiments, the engineered adenosine kinase comprises an amino acid sequence having at least 70%, 75%, 80%, 81%, 82%, 83%, 84%, 85%, 86%, 87%, 88%, 89%, 90%, 91%, 92%, 93%, 94%, 95%, 96%, 97%, 98%, 99%, or more sequence identity to the reference sequence corresponding to residues 12-321 of an even-numbered SEQ ID NO. of SEQ ID NOs: 1196-1344, or to the reference sequence corresponding to an even-numbered SEQ ID NO. of SEQ ID NOs: 1196-1344, wherein the amino acid sequence comprises one or more substitutions relative to the reference sequence corresponding to residues 12-321 of SEQ ID NO: 896, or relative to the reference sequence corresponding to SEQ ID NO: 896.

[0285] In some embodiments, the amino acid sequence of the engineered adenosine kinase comprises at least a substitution or substitution set at amino acid position(s) 52/169, 52/141/169, 52, 41, 169, 51/52/211, 52/141/187, 51/52, 141, 41/103, 311, 167, 41/311, 133, 207, 14, 34, 241, 33, 27, 206, 217, 239, 13, 246, 162, 108, 160, 245, 92, 163, 104, 157, 215, 80, 54, 240, 210, 23, 53, 87, 188, 151, 29, 258, 238, 244, 192, 91, or 30, wherein the amino acid positions are relative to the reference sequence corresponding to residues 12-321 of SEQ ID NO: 896, or relative to the reference sequence corresponding to SEQ ID NO: 896.

[0286] In some embodiments, the amino acid sequence of the engineered adenosine kinase comprises at least a substitution or substitution set, or amino acid residue(s) 52D/169M, 52D/141S/169M, 52G, 52G/169M, 52D, 41L, 52G/141S/169M, 169M, 51S/52G/211M, 52G/141S/187V, 51S/52D, 141S, 41L/103L, 311Q, 167F, 41L/311Q, 51S/52G, 133L, 207R, 14V, 34R, 241R, 33Q, 27S, 206A, 217V, 239R, 207T, 13A, 246T, 13P, 207M, 162F, 207L, 27P, 108C, 160L, 33S, 245W, 239F, 92M, 163G, 239T, 104C, 157P, 215L, 80V, 54V, 239A, 13E, 207V, 240V, 133A, 210L, 207A, 23N, 53R, 87K, 188T, 151L, 29R, 258S, 34G, 238L, 27R, 14S, 244W, 192L, 91Y, 206H, 30Y, 80S, 258R, 240L, or 104L, wherein the amino acid positions are relative to the reference sequence corresponding to residues 12-321 of SEQ ID NO: 896, or relative to the reference sequence corresponding to SEQ ID NO: 896.

[0287] In some embodiments, the amino acid sequence of the engineered adenosine kinase comprises at least a substitution or substitution set R52D/G169M, R52D/R141S/G169M, R52G, R52G/G169M, R52D, V41L, R52G/R141S/G169M, G169M, P51S/R52G/A211M, R52G/R141S/P187V, P51S/R52D, R141S, V41L/K103L, D311Q, A167F, V41L/D311Q, P51S/R52G, M133L, N207R, A14V, N34R, P241R, K33Q, V27S, S206A, E217V, H239R, N207T, S13A, D246T, S13P, N207M, N162F, N207L, V27P, L108C, I160L, K33S, Y245W, H239F, F92M, A163G, H239T, I104C, E157P, W215L, T80V, R54V, H239A, S13E, N207V, T240V, M133A, Q210L, N207A, D23N, M53R, P87K, E188T, V151L, P29R, P258S, N34G, V238L, V27R, A14S, T244W, F192L, H91Y, S206H, D30Y, T80S, P258R, T240L, or I104L, wherein the amino acid positions are relative to the reference sequence corresponding to residues 12-321 of SEQ ID NO: 896, or relative to the reference sequence corresponding to SEQ ID NO: 896.

[0288] In some embodiments, the engineered adenosine kinase comprises an amino acid sequence having at least 70%, 75%, 80%, 81%, 82%, 83%, 84%, 85%, 86%, 87%, 88%, 89%, 90%, 91%, 92%, 93%, 94%, 95%, 96%, 97%, 98%, 99%, or more sequence identity to the reference sequence corresponding to residues 12-321 of SEQ ID NO: 1196, or to the reference sequence corresponding to SEQ ID NO: 1196, wherein the amino acid sequence comprises one or more substitutions relative to the reference sequence corresponding to residues 12-321 of SEQ ID NO: 1196, or relative to the reference sequence corresponding to SEQ ID NO: 1196.

[0289] In some embodiments, the engineered adenosine kinase comprises an amino acid sequence having at least 70%, 75%, 80%, 81%, 82%, 83%, 84%, 85%, 86%, 87%, 88%, 89%, 90%, 91%, 92%, 93%, 94%, 95%, 96%, 97%, 98%, 99%, or more sequence identity to the reference sequence corresponding to residues 12-321 of an even-numbered SEQ ID NO. of SEQ ID NOs: 1346-1364, or to the reference sequence corresponding to an even-numbered SEQ ID NO. of SEQ ID NOs: 1346-1364, wherein the amino acid sequence comprises one or more substitutions relative to the reference sequence corresponding to residues 12-321 of SEQ ID NO: 1196, or relative to the reference sequence corresponding to SEQ ID NO: 1196.

[0290] In some embodiments, the amino acid sequence of the engineered adenosine kinase comprises at least a substitution or substitution set at amino acid position(s) 24, 234/236, 251/252, 119, 234, or 231/234, wherein the amino acid positions are relative to the reference sequence corresponding to residues 12-321 of SEQ ID NO: 1196, or relative to the reference sequence corresponding to SEQ ID NO: 1196.

[0291] In some embodiments, the amino acid sequence of the engineered adenosine kinase comprises at least a substitution or substitution set, or amino acid residue(s) 24V, 241, 234K/236C, 24N, 251H/252A, 119S, 119T, 234K, 234K/236S, or 231L/234K, wherein the amino acid positions are relative to the reference sequence corresponding to residues 12-321 of SEQ ID NO: 1196, or relative to the reference sequence corresponding to SEQ ID NO: 1196.

[0292] In some embodiments, the amino acid sequence of the engineered adenosine kinase comprises at least a substitution or substitution set T24V, T24I, A234K/A236C, T24N, K251H/T252A, M119S, M119T, A234K, A234K/A236S, or Q231L/A234K, wherein the amino acid positions are relative to the reference sequence corresponding to residues 12-321 of SEQ ID NO: 1196, or relative to the reference sequence corresponding to SEQ ID NO: 1196.

[0293] In some embodiments, the engineered adenosine kinase comprises an amino acid sequence having at least 70%, 75%, 80%, 81%, 82%, 83%, 84%, 85%, 86%, 87%, 88%, 89%, 90%, 91%, 92%, 93%, 94%, 95%, 96%, 97%, 98%, 99%, or more sequence identity to the reference sequence corresponding to residues 12-321 of SEQ ID NO: 1366, or to the reference sequence corresponding to SEQ ID NO: 1366, wherein the amino acid sequence comprises one or more substitutions relative to the reference sequence corresponding to residues 12-321 of SEQ ID NO: 1366, or relative to the reference sequence corresponding to SEQ ID NO: 1366.

[0294] In some embodiments, the engineered adenosine kinase comprises an amino acid sequence having at least 70%, 75%, 80%, 81%, 82%, 83%, 84%, 85%, 86%, 87%, 88%, 89%, 90%, 91%, 92%, 93%, 94%, 95%, 96%, 97%, 98%, 99%, or more sequence identity to the reference sequence corresponding to residues 12-321 of an even-numbered SEQ ID NO. of SEQ ID NOs: 1366-1410, or to the reference sequence corresponding to an even-numbered SEQ ID NO. of SEQ ID NOs: 1366-1410, wherein the amino acid sequence comprises one or more substitutions relative to the reference sequence corresponding to residues 12-321 of SEQ ID NO: 1366, or relative to the reference sequence corresponding to SEQ ID NO: 1366.

[0295] In some embodiments, the amino acid sequence of the engineered adenosine kinase comprises at least a substitution or substitution set at amino acid position(s) 182, 121, 249, 129, 152, 237, 155, 121/129/207/237/249, 121/129/207/249, 27/121/207, 27/121/207/249, 121/207, 121/237, 121/249, 121/207/252, 27/121/129/207, 27/121/129/237, 207, 182/207, 121/129, or 121/237/252, wherein the amino acid positions are relative to the reference sequence corresponding to residues 12-321 of SEQ ID NO: 1366, or relative to the reference sequence corresponding to SEQ ID NO: 1366.

[0296] In some embodiments, the amino acid sequence of the engineered adenosine kinase comprises at least a substitution or substitution set, or amino acid residue(s) 182G, 121Q, 249A, 129S, 152A, 237V, 155A, 121Q/129S/207R/237V/249A, 121Q/129S/207R/249A, 27P/121Q/207R, 27P/121Q/207R/249A, 121Q/207R, 121Q/237V, 121Q/249A, 121Q/207R/252V, 27P/121Q/129S/207R, 27P/121Q/129S/237V, 207R, 182G/207R, 121Q/129S, 121Q/237V/252V, or 155I, wherein the amino acid positions are relative to the reference sequence corresponding to residues 12-321 of SEQ ID NO: 1366, or relative to the reference sequence corresponding to SEQ ID NO: 1366.

[0297] In some embodiments, the amino acid sequence of the engineered adenosine kinase comprises at least a substitution or substitution set P182G, H121Q, P249A, G129S, G152A, L237V, G155A, H121Q/G129S/N207R/L237V/P249A, H121Q/G129S/N207R/P249A, V27P/H121Q/N207R, V27P/H121Q/N207R/P249A, H121Q/N207R, H121Q/L237V, H121Q/P249A, H121Q/N207R/T252V, V27P/H121Q/G129S/N207R, V27P/H121Q/G129S/L237V, N207R, P182G/N207R, H121Q/G129S, H121Q/L237V/T252V, or G155I, wherein the amino acid positions are relative to the reference sequence corresponding to residues 12-321 of SEQ ID NO: 1366, or relative to the reference sequence corresponding to SEQ ID NO: 1366.

[0298] In some embodiments, the engineered adenosine kinase comprises an amino acid sequence having at least 70%, 75%, 80%, 81%, 82%, 83%, 84%, 85%, 86%, 87%, 88%, 89%, 90%, 91%, 92%, 93%, 94%, 95%, 96%, 97%, 98%, 99%, or more sequence identity to the reference sequence corresponding to residues 12-321 of SEQ ID NO: 1382, or to the reference sequence corresponding to SEQ ID NO: 1382, wherein the amino acid sequence comprises one or more substitutions relative to the reference sequence corresponding to residues 12-321 of SEQ ID NO: 1382, or relative to the reference sequence corresponding to SEQ ID NO: 1382.

[0299] In some embodiments, the engineered adenosine kinase comprises an amino acid sequence having at least 70%, 75%, 80%, 81%, 82%, 83%, 84%, 85%, 86%, 87%, 88%, 89%, 90%, 91%, 92%, 93%, 94%, 95%, 96%, 97%, 98%, 99%, or more sequence identity to the reference sequence corresponding to residues 12-321 of an even-numbered SEQ ID NO. of SEQ ID NOs: 1412-1564, or to the reference sequence corresponding to an even-numbered SEQ ID NO. of SEQ ID NOs: 1412-1564, wherein the amino acid sequence comprises one or more substitutions relative to the reference sequence corresponding to residues 12-321 of SEQ ID NO: 1382, or relative to the reference sequence corresponding to SEQ ID NO: 1382.

[0300] In some embodiments, the amino acid sequence of the engineered adenosine kinase comprises at least a substitution or substitution set at amino acid position(s) 314, 221, 170, 40, 49, 73, 194, 195, 147, 218, 216, 90, 89, 42, 211, 106, 171, 93, 296, 100, 243, 172, 51, 271, 90/171/191, 90/271, 90/191, 90/147/171/271, 191, 51/90, 187/211, 171/191, 170/211, 49/51, 51/171/191/271, 40/211, 106/187/211, 211/221, 40/170/211, 49/51/90/147/171, 51/90/171, 51/171, 49/51/191, 49/51/90/147, 49/51/171/271, 106/211/221, 187/221, 49/171/191/314, 51/191/271, 51/90/171/191/271, 52/221, 90/171/191/271, 191/271, 170/221, 50/52, 50/52/106/211, 50/211/308, 50/52/106, 40/50/187/211/308, 50/52/106/170/187/308, 40/52/170, 50/106, 50/221/308, 49/51/90/271, 40/52/170/211, 187, 50/211/221/308, or 40/50/52/221, wherein the amino acid positions are relative to the reference sequence corresponding to residues 12-321 of SEQ ID NO: 1382, or relative to the reference sequence corresponding to SEQ ID NO: 1382.

[0301] In some embodiments, the amino acid sequence of the engineered adenosine kinase comprises at least a substitution or substitution set, or amino acid residue(s) 314S, 221A, 170K, 40H, 314V, 49M, 73C, 314Q, 194A, 195V, 147N, 218L, 216V, 90S, 89L, 42D, 211H, 90T, 106M, 171C, 93A, 296N, 100G, 243Y, 172S, 73A, 51F, 271W, 90S/171V/191W, 90S/271W, 90S/191W, 90S/147A/171V/271W, 191W, 51F/90S, 187H/211W, 171C/191W, 170M/211K, 49M/51G, 51G/171C/191W/271W, 40M/211K, 106T/187H/211K, 211W/221A, 40M/170M/211K, 211W, 49M/51G/90S/147A/171V, 51G/90S/171V, 51G/171V, 49M/51F/191W, 49M/51G/90S/147A, 51G, 49M/51F/171V/271W, 49M/51F/171C/271W, 106T/211K/221A, 211K, 187H/221A, 49M/171C/191W/314S, 51G/191W/271W, 51G/90S/171C/191W/271W, 52T/221A, 90S/171C/191W/271W, 191W/271W, 170M/221A, 50C/52T, 50C/52T/106T/211W, 50C/211K/308D, 50C/52S/106T, 40M, 40M/50C/187H/211K/308D, 50C/52T/106T/170M/187H/308D, 40M/52T/170M, 50C/106T, 50C/221A/308D, 49M/51F/90S/271W, 40M/52S/170M/211W, 187H, 50C/211K/221A/308D, or 40M/50C/52S/221A, wherein the amino acid positions are relative to the reference sequence corresponding to residues 12-321 of SEQ ID NO: 1382, or relative to the reference sequence corresponding to SEQ ID NO: 1382.

[0302] In some embodiments, the amino acid sequence of the engineered adenosine kinase comprises at least a substitution or substitution set K314S, V221A, G170K, R40H, K314V, L49M, G73C, K314Q, E194A, Q195V, T147N, Q218L, N216V, E90S, R89L, H42D, A211H, E90T, D106M, I171C, E93A, H296N, S100G, K243Y, P172S, G73A, P51F, Y271W, E90S/I171V/E191W, E90S/Y271W, E90S/E191W, E90S/T147A/I171V/Y271W, E191W, P51F/E90S, P187H/A211W, 1171C/E191W, G170M/A211K, L49M/P51G, P51G/I171C/E191W/Y271W, R40M/A211K, D106T/P187H/A211K, A211W/V221A, R40M/G170M/A211K, A211W, L49M/P51G/E90S/T147A/I171V, P51G/E90S/I171V, P51G/I171V, L49M/P51F/E191W, L49M/P51G/E90S/T147A, P51G, L49M/P51F/I171V/Y271W, L49M/P51F/I171C/Y271W, D106T/A211K/V221A, A211K, P187H/V221A, L49M/1171C/E191W/K314S, P51G/E191W/Y271W, P51G/E90S/1171C/E191W/Y271W, D52T/V221A, E90S/1171C/E191W/Y271W, E191W/Y271W, G170M/V221A, V50C/D52T, V50C/D52T/D106T/A211W, V50C/A211K/E308D, V50C/D52S/D106T, R40M, R40M/V50C/P187H/A211K/E308D, V50C/D52T/D106T/G170M/P187H/E308D, R40M/D52T/G170M, V50C/D106T, V50C/V221A/E308D, L49M/P51F/E90S/Y271W, R40M/D52S/G170M/A211W, P187H, V50C/A211K/V221A/E308D, or R40M/V50C/D52S/V221A, wherein the amino acid positions are relative to the reference sequence corresponding to residues 12-321 of SEQ ID NO: 1382, or relative to the reference sequence corresponding to SEQ ID NO: 1382.

[0303] In some embodiments, the engineered adenosine kinase comprises an amino acid sequence having at least 70%, 75%, 80%, 81%, 82%, 83%, 84%, 85%, 86%, 87%, 88%, 89%, 90%, 91%, 92%, 93%, 94%, 95%, 96%, 97%, 98%, 99%, or more sequence identity to the reference sequence corresponding to residues 12-321 of SEQ ID NO: 1464, or to the reference sequence corresponding to SEQ ID NO: 1464, wherein the amino acid sequence comprises one or more substitutions relative to the reference sequence corresponding to residues 12-321 of SEQ ID NO: 1464, or relative to the reference sequence corresponding to SEQ ID NO: 1464.

[0304] In some embodiments, the engineered adenosine kinase comprises an amino acid sequence having at least 70%, 75%, 80%, 81%, 82%, 83%, 84%, 85%, 86%, 87%, 88%, 89%, 90%, 91%, 92%, 93%, 94%, 95%, 96%, 97%, 98%, 99%, or more sequence identity to the reference sequence corresponding to residues 12-321 of an even-numbered SEQ ID NO. of SEQ ID NOs: 1566-1578, or to the reference sequence corresponding to an even-numbered SEQ ID NO. of SEQ ID NOs: 1566-1578, wherein the amino acid sequence comprises one or more substitutions relative to the reference sequence corresponding to residues 12-321 of SEQ ID NO: 1464, or relative to the reference sequence corresponding to SEQ ID NO: 1464.

[0305] In some embodiments, the amino acid sequence of the engineered adenosine kinase comprises at least a substitution at amino acid position 317, 113, 21, 155, 126, 155, or 231, or combinations thereof, wherein the amino acid positions are relative to the reference sequence corresponding to residues 12-321 of SEQ ID NO: 1464, or relative to the reference sequence corresponding to SEQ ID NO: 1464.

[0306] In some embodiments, the amino acid sequence of the engineered adenosine kinase comprises at least a substitution, or amino acid residue 317M, 113G, 21G, 155V, 126S, 155N, or 231M, or combinations thereof, wherein the amino acid positions are relative to the reference sequence corresponding to residues 12-321 of SEQ ID NO: 1464, or relative to the reference sequence corresponding to SEQ ID NO: 1464.

[0307] In some embodiments, the amino acid sequence of the engineered adenosine kinase comprises at least a substitution F317M, A113G, A21G, G155V, A126S, G155N, or Q231M, or combinations thereof, wherein the amino acid positions are relative to the reference sequence corresponding to residues 12-321 of SEQ ID NO: 1464, or relative to the reference sequence corresponding to SEQ ID NO: 1464.

[0308] In some embodiments, the engineered adenosine kinase comprises an amino acid sequence having at least 70%, 75%, 80%, 81%, 82%, 83%, 84%, 85%, 86%, 87%, 88%, 89%, 90%, 91%, 92%, 93%, 94%, 95%, 96%, 97%, 98%, 99%, or more sequence identity to the reference sequence corresponding to residues 12-321 of SEQ ID NO: 1568, or to the reference sequence corresponding to SEQ ID NO: 1568, wherein the amino acid sequence comprises one or more substitutions relative to the reference sequence corresponding to residues 12-321 of SEQ ID NO: 1568, or relative to the reference sequence corresponding to SEQ ID NO: 1568.

[0309] In some embodiments, the engineered adenosine kinase comprises an amino acid sequence having at least 70%, 75%, 80%, 81%, 82%, 83%, 84%, 85%, 86%, 87%, 88%, 89%, 90%, 91%, 92%, 93%, 94%, 95%, 96%, 97%, 98%, 99%, or more sequence identity to the reference sequence corresponding to residues 12-321 of an even-numbered SEQ ID NO. of SEQ ID NOs: 1580-1648, or to the reference sequence corresponding to an even-numbered SEQ ID NO. of SEQ ID NOs: 1580-1648, wherein the amino acid sequence comprises one or more substitutions relative to the reference sequence corresponding to residues 12-321 of SEQ ID NO: 1568, or relative to the reference sequence corresponding to SEQ ID NO: 1568.

[0310] In some embodiments, the amino acid sequence of the engineered adenosine kinase comprises at least a substitution or substitution set at amino acid position(s) 246, 74, 185, 244, 164, 276, 43, 163, 217, 31, 43/276, 185/187/276, 43/187/222/276, 185/187/222/276, 187/276, 185/276, 164/222, 164/187/222/276, 43/222/276, 164/187/222, 222, 43/164/185/187/222, 222/276, 239, or 53, wherein the amino acid positions are relative to the reference sequence corresponding to residues 12-321 of SEQ ID NO: 1568, or relative to the reference sequence corresponding to SEQ ID NO: 1568.

[0311] In some embodiments, the amino acid sequence of the engineered adenosine kinase comprises at least a substitution or substitution set, or amino acid residue(s) 246V, 74R, 185T, 244R, 246R, 164S, 276G, 43E, 246S, 163G, 217A, 31H, 43E/276E, 185S/187S/276G, 43E/187S/222Q/276D, 185S/187S/222Q/276D, 187S/276E, 187S/276D, 185S/276E, 164S/222Q, 164S/187S/222Q/276G, 43E/222Q/276G, 164S/187S/222Q, 222Q, 43E/164S/185S/187S/222Q, 222Q/276G, 276E, 276D, 31L, 31Y, 164Q, 239M, 53L, 185S, or 164A, wherein the amino acid positions are relative to the reference sequence corresponding to residues 12-321 of SEQ ID NO: 1568, or relative to the reference sequence corresponding to SEQ ID NO: 1568.

[0312] In some embodiments, the amino acid sequence of the engineered adenosine kinase comprises at least a substitution or substitution set D246V, A74R, N185T, T244R, D246R, E164S, N276G, R43E, D246S, A163G, E217A, Q31H, R43E/N276E, N185S/P187S/N276G, R43E/P187S/S222Q/N276D, N185S/P187S/S222Q/N276D, P187S/N276E, P187S/N276D, N185S/N276E, E164S/S222Q, E164S/P187S/S222Q/N276G, R43E/S222Q/N276G, E164S/P187S/S222Q, S222Q, R43E/E164S/N185S/P187S/S222Q, S222Q/N276G, N276E, N276D, Q31L, Q31Y, E164Q, H239M, M53L, N185S, or E164A, wherein the amino acid positions are relative to the reference sequence corresponding to residues 12-321 of SEQ ID NO: 1568, or relative to the reference sequence corresponding to SEQ ID NO: 1568.

[0313] In some embodiments, the engineered adenosine kinase comprises an amino acid sequence having at least 70%, 75%, 80%, 81%, 82%, 83%, 84%, 85%, 86%, 87%, 88%, 89%, 90%, 91%, 92%, 93%, 94%, 95%, 96%, 97%, 98%, 99%, or more sequence identity to the reference sequence corresponding to residues 12-321 of SEQ ID NO: 1616, or to the reference sequence corresponding to SEQ ID NO: 1616, wherein the amino acid sequence comprises one or more substitutions relative to the reference sequence corresponding to residues 12-321 of SEQ ID NO: 1616, or relative to the reference sequence corresponding to SEQ ID NO: 1616.

[0314] In some embodiments, the engineered adenosine kinase comprises an amino acid sequence having at least 70%, 75%, 80%, 81%, 82%, 83%, 84%, 85%, 86%, 87%, 88%, 89%, 90%, 91%, 92%, 93%, 94%, 95%, 96%, 97%, 98%, 99%, or more sequence identity to the reference sequence corresponding to residues 12-321 of an even-numbered SEQ ID NO. of SEQ ID NOs: 1650-1742, or to the reference sequence corresponding to an even-numbered SEQ ID NO. of SEQ ID NOs: 1650-1742, wherein the amino acid sequence comprises one or more substitutions relative to the reference sequence corresponding to residues 12-321 of SEQ ID NO: 1616, or relative to the reference sequence corresponding to SEQ ID NO: 1616.

[0315] In some embodiments, the amino acid sequence of the engineered adenosine kinase comprises at least a substitution or substitution set at amino acid position(s) 74/239/244/246, 31/74/207/239/244/246, 31/246, 74/244, 31/74, 53/74/239/244/246, 31/74/207/244/246, 31/74/163/239/244, 31/74/239/244/246, 31/244/246, 31/53/164, 31/239/244, 239/246, 163/164/207/239/244/246, 31/74/163/246, 244, 31/239/244/246, 31/53/239/244/246, 31/207/244/246, 31, 31/53/74/239/246, 31/74/207, 31/163/207/244, 31/53/244, 31/163, 31/53/239/246, 74/207/239/244, 31/163/164/207/239/244/246, 74/207, 31/163/207/239/244, 31/74/163/164/207/246, 31/53/207/239, 207, 53/163/207/246, 31/53/74/163/207/246, 31/163/239/246/308, 31/74/207/239/308, or 163/207/246, wherein the amino acid positions are relative to the reference sequence corresponding to residues 12-321 of SEQ ID NO: 1616, or relative to the reference sequence corresponding to SEQ ID NO: 1616.

[0316] In some embodiments, the amino acid sequence of the engineered adenosine kinase comprises at least a substitution or substitution set, or amino acid residue(s) 74T/239M/244R/246V, 31Y/74R/207M/239M/244R/246V, 31Y/246S, 74R/244R, 31R/74R, 53L/74T/239M/244R/246S, 53L/74R/239M/244R/246V, 31R/74T/207M/244R/246S, 31Y/74R/163G/239M/244R, 31Y/74R/239M/244R/246V, 31L/244R/246S, 31Y/244R/246S, 31R/53L/164Q, 31R/239M/244R, 239M/246V, 163G/164Q/207M/239M/244R/246V, 31Y/74R/163G/246V, 244R, 31L/239M/244R/246S, 31Y/74T, 31L/53L/239M/244R/246V, 31Y/74R, 31Y/207M/244R/246V, 31Y/53L/239M/244R/246V, 31Y, 31L/53L/74T/239M/246S, 31Y/74R/207M, 31Y/163G/207M/244R, 31R/207M/244R/246V, 31Y/53L/244R, 31Y/163G, 31R, 31R/53L/239M/246S, 74T/207M/239M/244R, 31L/163G/164Q/207M/239M/244R/246V, 74T/207M, 31Y/163G/207M/239M/244R, 31L/74R/163G/164Q/207M/246V, 31Y/53L/207M/239M, 31Y/207M/244R/246S, 207M, 53L/163G/207M/246S, 31R/53L/74T/163G/207M/246S, 31Y/163G/239M/246V/308K, 31R/207M/244R/246S, 31Y/74R/207M/239M/308K, or 163G/207M/246V, wherein the amino acid positions are relative to the reference sequence corresponding to residues 12-321 of SEQ ID NO: 1616, or relative to the reference sequence corresponding to SEQ ID NO: 1616.

[0317] In some embodiments, the amino acid sequence of the engineered adenosine kinase comprises at least a substitution or substitution set A74T/H239M/T244R/D246V, Q31Y/A74R/R207M/H239M/T244R/D246V, Q31Y/D246S, A74R/T244R, Q31R/A74R, M53L/A74T/H239M/T244R/D246S, M53L/A74R/H239M/T244R/D246V, Q31R/A74T/R207M/T244R/D246S, Q31Y/A74R/A163G/H239M/T244R, Q31Y/A74R/H239M/T244R/D246V, Q31L/T244R/D246S, Q31Y/T244R/D246S, Q31R/M53L/E164Q, Q31R/H239M/T244R, H239M/D246V, A163G/E164Q/R207M/H239M/T244R/D246V, Q31Y/A74R/A163G/D246V, T244R, Q31L/H239M/T244R/D246S, Q31Y/A74T, Q31L/M53L/H239M/T244R/D246V, Q31Y/A74R, Q31Y/R207M/T244R/D246V, Q31Y/M53L/H239M/T244R/D246V, Q31Y, Q31L/M53L/A74T/H239M/D246S, Q31Y/A74R/R207M, Q31Y/A163G/R207M/T244R, Q31R/R207M/T244R/D246V, Q31Y/M53L/T244R, Q31Y/A163G, Q31R, Q31R/M53L/H239M/D246S, A74T/R207M/H239M/T244R, Q31L/A163G/E164Q/R207M/H239M/T244R/D246V, A74T/R207M, Q31Y/A163G/R207M/H239M/T244R, Q31L/A74R/A163G/E164Q/R207M/D246V, Q31Y/M53L/R207M/H239M, Q31Y/R207M/T244R/D246S, R207M, M53L/A163G/R207M/D246S, Q31R/M53L/A74T/A163G/R207M/D246S, Q31Y/A163G/H239M/D246V/E308K, Q31R/R207M/T244R/D246S, Q31Y/A74R/R207M/H239M/E308K, or A163G/R207M/D246V, wherein the amino acid positions are relative to the reference sequence corresponding to residues 12-321 of SEQ ID NO: 1616, or relative to the reference sequence corresponding to SEQ ID NO: 1616.

[0318] In some embodiments, the engineered adenosine kinase comprises an amino acid sequence having at least 70%, 75%, 80%, 81%, 82%, 83%, 84%, 85%, 86%, 87%, 88%, 89%, 90%, 91%, 92%, 93%, 94%, 95%, 96%, 97%, 98%, 99%, or more sequence identity to the reference sequence corresponding to residues 12-321 of SEQ ID NO: 1668, or to the reference sequence corresponding to SEQ ID NO: 1668, wherein the amino acid sequence comprises one or more substitutions relative to the reference sequence corresponding to residues 12-321 of SEQ ID NO: 1668, or relative to the reference sequence corresponding to SEQ ID NO: 1668.

[0319] In some embodiments, the engineered adenosine kinase comprises an amino acid sequence having at least 70%, 75%, 80%, 81%, 82%, 83%, 84%, 85%, 86%, 87%, 88%, 89%, 90%, 91%, 92%, 93%, 94%, 95%, 96%, 97%, 98%, 99%, or more sequence identity to the reference sequence corresponding to residues 12-321 of an even-numbered SEQ ID NO. of SEQ ID NOs: 1744-1808, or to the reference sequence corresponding to an even-numbered SEQ ID NO. of SEQ ID NOs: 1744-1808, wherein the amino acid sequence comprises one or more substitutions relative to the reference sequence corresponding to residues 12-321 of SEQ ID NO: 1668, or relative to the reference sequence corresponding to SEQ ID NO: 1668.

[0320] In some embodiments, the amino acid sequence of the engineered adenosine kinase comprises at least a substitution or substitution set at amino acid position(s) 312, 305, 246, 89, 33, 218, 147, 27/218/305/312, 27/35/106/218/312, 27/218/312, 27/312, 27/305/312, 27/106/218/312, 27/218, 27/106/312, 35/305, 27/144/312, 27/218/305, 35/312, 27/106/218/305/312, 27/35/106/312, 106/218/305, 106/218/312, 27/106/305, 27/35/94/106/305/312, 35/218/312, 218/312, 27/106/218, 35/106/312, or 27/106, wherein the amino acid positions are relative to the reference sequence corresponding to residues 12-321 of SEQ ID NO: 1668, or relative to the reference sequence corresponding to SEQ ID NO: 1668.

[0321] In some embodiments, the amino acid sequence of the engineered adenosine kinase comprises at least a substitution or substitution set, or amino acid residue(s) 312R, 305T, 246D, 89K, 33A, 218D, 147N, 27W/218D/305T/312R, 27K/35Y/106P/218D/312R, 27W/218D/312R, 27W/312R, 27W/305T/312R, 27W/106P/218D/312R, 27W/218D, 27W/106P/312R, 35Y/305T, 27W/144S/312R, 27W/218D/305S, 35Y/312R, 27W/106P/218D/305S/312R, 27W/35Y/106P/312R, 106P/218D/305T, 27W/106P/218D/305T/312R, 106P/218D/312R, 27W/106P/305T, 27W/35Y/94N/106P/305S/312R, 35Y/218D/312R, 218D/312R, 27W/106P/218D, 35Y/106P/312R, 27W/106P, or 27W/106P/305S, wherein the amino acid positions are relative to the reference sequence corresponding to residues 12-321 of SEQ ID NO: 1668, or relative to the reference sequence corresponding to SEQ ID NO: 1668.

[0322] In some embodiments, the amino acid sequence of the engineered adenosine kinase comprises at least a substitution or substitution set Q312R, D305T, V246D, R89K, K33A, Q218D, T147N, V27W/Q218D/D305T/Q312R, V27K/H35Y/D106P/Q218D/Q312R, V27W/Q218D/Q312R, V27W/Q312R, V27W/D305T/Q312R, V27W/D106P/Q218D/Q312R, V27W/Q218D, V27W/D106P/Q312R, H35Y/D305T, V27W/P144S/Q312R, V27W/Q218D/D305S, H35Y/Q312R, V27W/D106P/Q218D/D305S/Q312R, V27W/H35Y/D106P/Q312R, D106P/Q218D/D305T, V27W/D106P/Q218D/D305T/Q312R, D106P/Q218D/Q312R, V27W/D106P/D305T, V27W/H35Y/T94N/D106P/D305S/Q312R, H35Y/Q218D/Q312R, Q218D/Q312R, V27W/D106P/Q218D, H35Y/D106P/Q312R, V27W/D106P, or V27W/D106P/D305S, wherein the amino acid positions are relative to the reference sequence corresponding to residues 12-321 of SEQ ID NO: 1668, or relative to the reference sequence corresponding to SEQ ID NO: 1668.

[0323] In some embodiments, the engineered adenosine kinase comprises an amino acid sequence having at least 70%, 75%, 80%, 81%, 82%, 83%, 84%, 85%, 86%, 87%, 88%, 89%, 90%, 91%, 92%, 93%, 94%, 95%, 96%, 97%, 98%, 99%, or more sequence identity to the reference sequence corresponding to residues 12-321 of SEQ ID NO: 1766, or to the reference sequence corresponding to SEQ ID NO: 1766, wherein the amino acid sequence comprises one or more substitutions relative to the reference sequence corresponding to residues 12-321 of SEQ ID NO: 1766, or relative to the reference sequence corresponding to SEQ ID NO: 1766.

[0324] In some embodiments, the engineered adenosine kinase comprises an amino acid sequence having at least 70%, 75%, 80%, 81%, 82%, 83%, 84%, 85%, 86%, 87%, 88%, 89%, 90%, 91%, 92%, 93%, 94%, 95%, 96%, 97%, 98%, 99%, or more sequence identity to the reference sequence corresponding to residues 12-321 of an even-numbered SEQ ID NO. of SEQ ID NOs: 1818-1870, or to the reference sequence corresponding to an even-numbered SEQ ID NO. of SEQ ID NOs: 1818-1870, wherein the amino acid sequence comprises one or more substitutions relative to the reference sequence corresponding to residues 12-321 of SEQ ID NO: 1766, or relative to the reference sequence corresponding to SEQ ID NO: 1766.

[0325] In some embodiments, the amino acid sequence of the engineered adenosine kinase comprises at least a substitution at amino acid position 34, 112, 126, 128, 155, 179, 183, 229, 236, 248, 253, 254, 292, 293, or 299, or combinations thereof, wherein the amino acid positions are relative to the reference sequence corresponding to amino acid residues 12-321 of SEQ ID NO: 1766, or relative to the reference sequence corresponding to SEQ ID NO: 1766.

[0326] In some embodiments, the amino acid sequence of the engineered adenosine kinase comprises at least a substitution, or amino acid residue 34C, 112I, 126L, 128V, 155T, 179N, 183S, 183V, 229C, 229V, 236C, 248E, 253D, 253E, 253G, 253H, 253K, 253L, 253S, 253T, 253V, 254M, 254T, 292I, 292V, 293M, or 299G, or combinations thereof, wherein the amino acid positions are relative to the reference sequence corresponding to residues 12-321 of SEQ ID NO: 1766, or relative to the reference sequence corresponding to SEQ ID NO: 1766.

[0327] In some embodiments, the amino acid sequence of the engineered adenosine kinase comprises at least a substitution N34C, Q112I, A126L, H128V, G155T, Q179N, L183S, L183V, T229C, T229V, A236C, P248E, R253D, R253E, R253G, R253H, R253K, R253L, R253S, R253T, R253V, R254M, R254T, L292I, L292V, K293M, or T299G, or combinations thereof, wherein the amino acid positions are relative to the reference sequence corresponding to residues 12-321 of SEQ ID NO: 1766, or relative to the reference sequence corresponding to SEQ ID NO: 1766.

[0328] In some embodiments, the engineered adenosine kinase comprises an amino acid sequence having at least 70%, 75%, 80%, 81%, 82%, 83%, 84%, 85%, 86%, 87%, 88%, 89%, 90%, 91%, 92%, 93%, 94%, 95%, 96%, 97%, 98%, 99%, or more sequence identity to the reference sequence corresponding to residues 12-321 of SEQ ID NO: 1826, or to the reference sequence corresponding to SEQ ID NO: 1826, wherein the amino acid sequence comprises one or more substitutions relative to the reference sequence corresponding to residues 12-321 of SEQ ID NO: 1826, or relative to the reference sequence corresponding to SEQ ID NO: 1826.

[0329] In some embodiments, the engineered adenosine kinase comprises an amino acid sequence having at least 70%, 75%, 80%, 81%, 82%, 83%, 84%, 85%, 86%, 87%, 88%, 89%, 90%, 91%, 92%, 93%, 94%, 95%, 96%, 97%, 98%, 99%, or more sequence identity to the reference sequence corresponding to residues 12-321 of an even-numbered SEQ ID NO. of SEQ ID NOs: 1872-1936, or to the reference sequence corresponding to an even-numbered SEQ ID NO. of SEQ ID NOs: 1872-1936, wherein the amino acid sequence comprises one or more substitutions relative to the reference sequence corresponding to residues 12-321 of SEQ ID NO: 1826, or relative to the reference sequence corresponding to SEQ ID NO: 1826.

[0330] In some embodiments, the amino acid sequence of the engineered adenosine kinase comprises at least a substitution at amino acid position 14, 38, 46, 108, 146, 211, 243, 275, 303, 311, or 320, or combinations thereof, wherein the amino acid positions are relative to the reference sequence corresponding to amino acid residues 12-321 of SEQ ID NO: 1826, or relative to the reference sequence corresponding to SEQ ID NO: 1826.

[0331] In some embodiments, the amino acid sequence of the engineered adenosine kinase comprises at least a substitution, or amino acid residue 14S, 14T, 38R, 46I, 108A, 146C, 211R, 243F, 275S, 303D, 303S, 311E, 320G, or 320R, or combinations thereof, wherein the amino acid positions are relative to the reference sequence corresponding to residues 12-321 of SEQ ID NO: 1826, or relative to the reference sequence corresponding to SEQ ID NO: 1826.

[0332] In some embodiments, the amino acid sequence of the engineered adenosine kinase comprises at least a substitution A14S, A14T, P38R, V46I, L108A, V146C, A211R, K243F, H275S, R303D, R303S, D311E, A320G, or A320R, or combinations thereof, wherein the amino acid positions are relative to the reference sequence corresponding to residues 12-321 of SEQ ID NO: 1826, or relative to the reference sequence corresponding to SEQ ID NO: 1826.

[0333] In some embodiments, the amino acid sequence of the engineered adenosine kinase comprises at least a substitution at amino acid position 94, 106, 108, 194, 274, 303, 307, or 315, or combinations thereof, wherein the amino acid positions are relative to the reference sequence corresponding to amino acid residues 12-321 of SEQ ID NO: 1826, or relative to the reference sequence corresponding to SEQ ID NO: 1826.

[0334] In some embodiments, the amino acid sequence of the engineered adenosine kinase comprises at least a substitution, or amino acid residue 94M, 106L, 108E, 194R, 274R, 303V, 307G, or 315S, or combinations thereof, wherein the amino acid positions are relative to the reference sequence corresponding to residues 12-321 of SEQ ID NO: 1826, or relative to the reference sequence corresponding to SEQ ID NO: 1826.

[0335] In some embodiments, the amino acid sequence of the engineered adenosine kinase comprises at least a substitution T94M, D106L, L108E, E194R, Q274R, R303V, A307G, or Q315S, or combinations thereof, wherein the amino acid positions are relative to the reference sequence corresponding to residues 12-321 of SEQ ID NO: 1826, or relative to the reference sequence corresponding to SEQ ID NO: 1826.

[0336] In some embodiments, the amino acid sequence of the engineered adenosine kinase comprises at least a substitution or substitution set at amino acid position(s) 112/183/292/299, 112/292, 126/299, 155, 155/183/299, 155/299, 183/255/299, 183/299, 229/299, 255/299, or 292, wherein the amino acid positions are relative to the reference sequence corresponding to amino acid residues 12-321 of SEQ ID NO: 1826, or relative to the reference sequence corresponding to SEQ ID NO: 1826.

[0337] In some embodiments, the amino acid sequence of the engineered adenosine kinase comprises at least a substitution or substitution set, or amino acid residue(s) 112I/183V/292I/299G, 112I/292I, 126L/299G, 155T, 155T/183V/299G, 155T/299G, 183V/255I/299G, 183V/299G, 229H/299G, 255I/299G, or 292I, wherein the amino acid positions are relative to the reference sequence corresponding to residues 12-321 of SEQ ID NO: 1826, or relative to the reference sequence corresponding to SEQ ID NO: 1826.

[0338] In some embodiments, the amino acid sequence of the engineered adenosine kinase comprises at least a substitution or substitution set Q112I/L183V/L292I/T299G, Q112I/L292I, A126L/T299G, G155T, G155T/L183V/T299G, G155T/T299G, L183V/V255I/T299G, L183V/T299G, T229H/T299G, V255I/T299G, or L292I, wherein the amino acid positions are relative to the reference sequence corresponding to residues 12-321 of SEQ ID NO: 1826, or relative to the reference sequence corresponding to SEQ ID NO: 1826.

[0339] In some embodiments, the engineered adenosine kinase comprises an amino acid sequence having at least 70%, 75%, 80%, 81%, 82%, 83%, 84%, 85%, 86%, 87%, 88%, 89%, 90%, 91%, 92%, 93%, 94%, 95%, 96%, 97%, 98%, 99%, or more sequence identity to the reference sequence corresponding to residues 12-321 of SEQ ID NO: 1918, or to the reference sequence corresponding to SEQ ID NO: 1918, wherein the amino acid sequence comprises one or more substitutions relative to the reference sequence corresponding to residues 12-321 of SEQ ID NO: 1918, or relative to the reference sequence corresponding to SEQ ID NO: 1918.

[0340] In some embodiments, the engineered adenosine kinase comprises an amino acid sequence having at least 70%, 75%, 80%, 81%, 82%, 83%, 84%, 85%, 86%, 87%, 88%, 89%, 90%, 91%, 92%, 93%, 94%, 95%, 96%, 97%, 98%, 99%, or more sequence identity to the reference sequence corresponding to residues 12-321 of an even-numbered SEQ ID NO. of SEQ ID NOs: 1938-2010, or to the reference sequence corresponding to an even-numbered SEQ ID NO. of SEQ ID NOs: 1938-2010, wherein the amino acid sequence comprises one or more substitutions relative to the reference sequence corresponding to residues 12-321 of SEQ ID NO: 1918, or relative to the reference sequence corresponding to SEQ ID NO: 1918.

[0341] In some embodiments, the amino acid sequence of the engineered adenosine kinase comprises at least a substitution at amino acid position 26, 27, 28, 29, 31, 33, 35, 42, 136, 212, 218, 237, 239, 245, 246, 252, 276, or 316, or combinations thereof, wherein the amino acid positions are relative to the reference sequence corresponding to amino acid residues 12-321 of SEQ ID NO: 1918, or relative to the reference sequence corresponding to SEQ ID NO: 1918.

[0342] In some embodiments, the amino acid sequence of the engineered adenosine kinase comprises at least a substitution, or amino acid residue 26F, 27C, 27G, 27R, 27S, 28L, 28M, 29G, 31H, 33A, 33P, 35D, 35E, 42G, 42N, 42Q, 136F, 212A, 218R, 237K, 237L, 237Q, 239A, 239G, 239H, 239I, 239T, 239W, 245F, 245Q, 246A, 246T, 252A, 252G, 276G, 316A, or 316I, or combinations thereof, wherein the amino acid positions are relative to the reference sequence corresponding to residues 12-321 of SEQ ID NO: 1918, or relative to the reference sequence corresponding to SEQ ID NO: 1918.

[0343] In some embodiments, the amino acid sequence of the engineered adenosine kinase comprises at least a substitution M26F, W27C, W27G, W27R, W27S, F28L, F28M, P29G, Y31H, K33A, K33P, H35D, H35E, H42G, H42N, H42Q, Y136F, R212A, Q218R, V237K, V237L, V237Q, M239A, M239G, M239H, M239I, M239T, M239W, Y245F, Y245Q, V246A, V246T, T252A, T252G, E276G, Y316A, or Y316I, or combinations thereof, wherein the amino acid positions are relative to the reference sequence corresponding to residues 12-321 of SEQ ID NO: 1918, or relative to the reference sequence corresponding to SEQ ID NO: 1918.

[0344] In some embodiments, the engineered adenosine kinase comprises an amino acid sequence having at least 70%, 75%, 80%, 81%, 82%, 83%, 84%, 85%, 86%, 87%, 88%, 89%, 90%, 91%, 92%, 93%, 94%, 95%, 96%, 97%, 98%, 99%, or more sequence identity to the reference sequence corresponding to residues 12-321 of SEQ ID NO: 1942, or to the reference sequence corresponding to SEQ ID NO: 1942, wherein the amino acid sequence comprises one or more substitutions relative to the reference sequence corresponding to residues 12-321 of SEQ ID NO: 1942, or relative to the reference sequence corresponding to SEQ ID NO: 1942.

[0345] In some embodiments, the engineered adenosine kinase comprises an amino acid sequence having at least 70%, 75%, 80%, 81%, 82%, 83%, 84%, 85%, 86%, 87%, 88%, 89%, 90%, 91%, 92%, 93%, 94%, 95%, 96%, 97%, 98%, 99%, or more sequence identity to the reference sequence corresponding to residues 12-321 of an even-numbered SEQ ID NO. of SEQ ID NOs: 2012-2124, or to the reference sequence corresponding to an even-numbered SEQ ID NO. of SEQ ID NOs: 2012-2124, wherein the amino acid sequence comprises one or more substitutions relative to the reference sequence corresponding to residues 12-321 of SEQ ID NO: 1942, or relative to the reference sequence corresponding to SEQ ID NO: 1942.

[0346] In some embodiments, the amino acid sequence of the engineered adenosine kinase comprises at least a substitution or substitution set at amino acid position(s) 26/27, 26/27/28, 26/27/28/31, 26/27/28/245, 26/28/31, 27, 27/28, 27/28/29/126, 27/29, 27/29/126, 27/29/237, 27/29/245, 27/31/126/245, 27/31/155, 27/126, 27/126/155, 27/126/237, 27/126/237/245, 27/237, 27/245, 28, 28/31, 28/31/239, 28/42/126/245, 28/42/245, 28/239, 29/31, 29/31/126/239, 30/31/33/35/126/218, 30/31/33/126/276/316, 30/33/35, 31/33/218/276, 31/126, 31/126/155, 33, 33/126/239, 42, 126, 126/155, 126/155/237, 126/155/239/276, 126/155/239/316, 126/239, 126/239/316, 126/245, 126/316, 155/276/316, 155/316, 218, 218/239/316, 239, 245, 252/276, or 316, wherein the amino acid positions are relative to the reference sequence corresponding to amino acid residues 12-321 of SEQ ID NO: 1942, or relative to the reference sequence corresponding to SEQ ID NO: 1942.

[0347] In some embodiments, the amino acid sequence of the engineered adenosine kinase comprises at least a substitution or substitution set, or amino acid residue(s) 26F/27G/28M, 26F/27R, 26F/27R/28L/31H, 26F/27R/28M/245F, 26F/28M/31H, 27G, 27G/28M, 27G/29G, 27G/29G/237K, 27G/29G/237Q, 27G/29G/245F, 27G/31H/126A/245F, 27G/31H/155T, 27G/126A, 27G/126A/155T, 27G/126A/237K, 27G/126A/237Q/245F, 27G/237K, 27G/245F, 27R, 27R/28M/29G/126A, 27R/29G/126A, 27R/245F, 28L/31H/239T, 28L/239T, 28M, 28M/31H, 28M/42N/126A/245F, 28M/42N/245F, 29G/31H, 29G/31H/126A/239T, 30G/31H/33A/35D/126A/218N, 30G/31H/33A/126A/276G/316I, 30G/33A/35D, 31H/33A/218N/276G, 31H/126A, 31H1126A/155T, 33A, 33A/126A/239H, 42N, 126A, 126A/155T, 126A/155T/237K, 126A/155T/239H/316I, 126A/155T/239T/276G, 126A/239H, 126A/239H/316I, 126A/245F, 126A/316I, 155T/276G/316I, 155T/316I, 218N, 218N/239H/316I, 239H, 245F, 252T/276G, or 316I, wherein the amino acid positions are relative to the reference sequence corresponding to residues 12-321 of SEQ ID NO: 1942, or relative to the reference sequence corresponding to SEQ ID NO: 1942.

[0348] In some embodiments, the amino acid sequence of the engineered adenosine kinase comprises at least a substitution or substitution set M26F/W27G/F28M, M26F/W27R, M26F/W27R/F28L/Y31H, M26F/W27R/F28M/Y245F, M26F/F28M/Y31H, W27G, W27G/F28M, W27G/P29G, W27G/P29G/V237K, W27G/P29G/V237Q, W27G/P29G/Y245F, W27G/Y31H/L126A/Y245F, W27G/Y31H/G155T, W27G/L126A, W27G/L126A/G155T, W27G/L126A/V237K, W27G/L126A/V237Q/Y245F, W27G/V237K, W27G/Y245F, W27R, W27R/F28M/P29G/L126A, W27R/P29G/L126A, W27R/Y245F, F28L/Y31H/M239T, F28L/M239T, F28M, F28M/Y31H, F28M/H42N/L126A/Y245F, F28M/H42N/Y245F, P29G/Y31H, P29G/Y31H/L126A/M239T, D30G/Y31H/K33A/H35D/L126A/Q218N, D30G/Y31H/K33A/L126A/E276G/Y316I, D30G/K33A/H35D, Y31H/K33A/Q218N/E276G, Y31H/L126A, Y31H/L126A/G155T, K33A, K33A/L126A/M239H, H42N, L126A, L126A/G155T, L126A/G155T/V237K, L126A/G155T/M239H/Y316I, L126A/G155T/M239T/E276G, L126A/M239H, L126A/M239H/Y316I, L126A/Y245F, L126A/Y316I, G155T/E276G/Y316I, G155T/Y316I, Q218N, Q218N/M239H/Y316I, M239H, Y245F, A252T/E276G, or Y316I, wherein the amino acid positions are relative to the reference sequence corresponding to residues 12-321 of SEQ ID NO: 1942, or relative to the reference sequence corresponding to SEQ ID NO: 1942.

[0349] In some embodiments, the amino acid sequence of the engineered adenosine kinase comprises at least a substitution at an amino acid position set forth in Tables 7.1, 7.2, 8.1, 9.1, 10.2, 11.2, 12.2, 13.2, 14.2, 15.2, 16.2, 17.2, 18.2, 20.2, 21.2, 22.2, 23.2, 24.2, 25.2, 26.2, 27.2, 28.2, 29.2, 30.2, 31.2, 32.2, 33.2, 34.2, 35.2, 36.2, 37.2, 38.2, 39.2, 40.2, 41.2, 42.2, 43.2, 45.2, 46.2, 47.2, 48.2, 49.2 and 50.2, wherein the amino acid positions are relative to the reference sequence corresponding to amino acid residues 12-321 of SEQ ID NO: 2, 90, 254, 370, 734, 896, 1196, 1366, 1382, 1464, 1568, 1616, 1668, 1766, 1826, 1918, or 1942, or relative to the reference sequence corresponding to SEQ ID NO: 2, 90, 254, 370, 734, 896, 1196, 1366, 1382, 1464, 1568, 1616, 1668, 1766, 1826, 1918, or 1942.

[0350] In some embodiments, the amino acid sequence of the engineered adenosine kinase comprises at least one substitution set forth in Tables 7.1, 7.2, 8.1, 9.1, 10.2, 11.2, 12.2, 13.2, 14.2, 15.2, 16.2, 17.2, 18.2, 20.2, 21.2, 22.2, 23.2, 24.2, 25.2, 26.2, 27.2, 28.2, 29.2, 30.2, 31.2, 32.2, 33.2, 34.2, 35.2, 36.2, 37.2, 38.2, 39.2, 40.2, 41.2, 42.2, 43.2, 45.2, 46.2, 47.2, 48.2, 49.2 and 50.2, wherein the amino acid positions are relative to the reference sequence corresponding to amino acid residues 12-321 of SEQ ID NO: 2, 90, 254, 370, 734, 896, 1196, 1366, 1382, 1464, 1568, 1616, 1668, 1766, 1826, 1918, or 1942, or relative to the reference sequence corresponding to SEQ ID NO: 2, 90, 254, 370, 734, 896, 1196, 1366, 1382, 1464, 1568, 1616, 1668, 1766, 1826, 1918, or 1942.

[0351] In some embodiments, the amino acid sequence of the engineered adenosine kinase comprises at least a substitution or substitution set at amino acid position(s) set forth in Tables 7.1, 7.2, 8.1, 9.1, 10.2, 11.2, 12.2, 13.2, 14.2, 15.2, 16.2, 17.2, 18.2, 20.2, 21.2, 22.2, 23.2, 24.2, 25.2, 26.2, 27.2, 28.2, 29.2, 30.2, 31.2, 32.2, 33.2, 34.2, 35.2, 36.2, 37.2, 38.2, 39.2, 40.2, 41.2, 42.2, 43.2, 45.2, 46.2, 47.2, 48.2, 49.2 and 50.2, wherein the amino acid positions are relative to the reference sequence corresponding to amino acid residues 12-321 of SEQ ID NO: 2, 90, 254, 370, 734, 896, 1196, 1366, 1382, 1464, 1568, 1616, 1668, 1766, 1826, 1918, or 1942, or relative to the reference sequence corresponding to SEQ ID NO: 2, 90, 254, 370, 734, 896, 1196, 1366, 1382, 1464, 1568, 1616, 1668, 1766, 1826, 1918, or 1942.

[0352] In some embodiments, the amino acid sequence of the engineered adenosine kinase comprises at least a substitution or substitution set of an engineered adenosine kinase variant set forth in Tables 7.1, 7.2, 8.1, 9.1, 10.2, 11.2, 12.2, 13.2, 14.2, 15.2, 16.2, 17.2, 18.2, 20.2, 21.2, 22.2, 23.2, 24.2, 25.2, 26.2, 27.2, 28.2, 29.2, 30.2, 31.2, 32.2, 33.2, 34.2, 35.2, 36.2, 37.2, 38.2, 39.2, 40.2, 41.2, 42.2, 43.2, 45.2, 46.2, 47.2, 48.2, 49.2 and 50.2, wherein the amino acid positions are relative to the reference sequence corresponding to amino acid residues 12-321 of SEQ ID NO: 2, 90, 254, 370, 734, 896, 1196, 1366, 1382, 1464, 1568, 1616, 1668, 1766, 1826, 1918, or 1942, or relative to the reference sequence corresponding to SEQ ID NO: 2, 90, 254, 370, 734, 896, 1196, 1366, 1382, 1464, 1568, 1616, 1668, 1766, 1826, 1918, or 1942.

[0353] In some embodiments, the engineered adenosine kinase comprises an amino acid sequence having at least 70%, 75%, 80%, 81%, 82%, 83%, 84%, 85%, 86%, 87%, 88%, 89%, 90%, 91%, 92%, 93%, 94%, 95%, 96%, 97%, 98%, 99% or more sequence identity to a reference amino acid sequence comprising a substitution or substitution set of an engineered adenosine kinase variant set forth in Tables 7.1, 7.2, 8.1, 9.1, 10.2, 11.2, 12.2, 13.2, 14.2, 15.2, 16.2, 17.2, 18.2, 20.2, 21.2, 22.2, 23.2, 24.2, 25.2, 26.2, 27.2, 28.2, 29.2, 30.2, 31.2, 32.2, 33.2, 34.2, 35.2, 36.2, 37.2, 38.2, 39.2, 40.2, 41.2, 42.2, 43.2, 45.2, 46.2, 47.2, 48.2, 49.2 and 50.2, wherein the amino acid positions are relative to the reference sequence corresponding to amino acid residues 12-321 of SEQ ID NO: 2, 90, 254, 370, 734, 896, 1196, 1366, 1382, 1464, 1568, 1616, 1668, 1766, 1826, 1918, or 1942, or relative to the reference sequence corresponding to SEQ ID NO: 2, 90, 254, 370, 734, 896, 1196, 1366, 1382, 1464, 1568, 1616, 1668, 1766, 1826, 1918, or 1942.

[0354] In some embodiments, the engineered adenosine kinase comprises an amino acid sequence comprising residues 12-321 of an even-numbered SEQ ID NO. of SEQ ID NOs: 4-1142, 1194-1808 and 1818-2124, or comprises an even-numbered SEQ ID NO. of SEQ ID NOs: 4-1142, 1194-1808 and 1818-2124. In some embodiments, the amino acid sequence of the engineered adenosine kinase optionally included 1, 2, 3, 4, 5, 6, 7, 8, 9, or up to 10 substitutions in the amino acid sequence. In some embodiments, the amino acid sequence of the engineered adenosine kinase optionally includes 1, 2, 3, 4, 5, 6, 7, 8, 9, or up to 10 substitutions, insertions, and/or deletions. In some embodiments, the amino acid sequence of the engineered adenosine kinase includes 1, 2, 3, 4, 5, 6, 7, 8, 9, or up to 10 substitutions. In some embodiments, the amino acid sequence of the engineered adenosine kinase optionally includes 1, 2, 3, 4, or 5 substitutions, insertions, and/or deletions. In some embodiments, the amino acid sequence of the engineered adenosine optionally includes 1, 2, 3, 4, or 5 substitutions.

[0355] In some embodiments, the engineered adenosine kinase comprises an amino acid sequence comprising residues 12-321 of SEQ ID NO: 90, 254, 370, 734, 896, 1196, 1366, 1382, 1464, 1568, 1616, 1668, 1766, 1826, 1918, or 1942, or comprises SEQ ID NO: 90, 254, 370, 734, 896, 1196, 1366, 1382, 1464, 1568, 1616, 1668, 1766, 1826, 1918, or 1942. In some embodiments, the amino acid sequence of the engineered adenosine kinase optionally includes 1, 2, 3, 4, 5, 6, 7, 8, 9, or up to 10 substitutions, insertions, and/or deletions. In some embodiments, the amino acid sequence of the engineered adenosine kinase includes 1, 2, 3, 4, 5, 6, 7, 8, 9, or up to 10 substitutions. In some embodiments, the amino acid sequence of the engineered adenosine kinase optionally includes 1, 2, 3, 4, or 5 substitutions, insertions, and/or deletions. In some embodiments, the amino acid sequence of the engineered adenosine optionally includes 1, 2, 3, 4, or 5 substitutions.

[0356] In some embodiments, the engineered adenosine kinase has adenosine kinase activity and at least one improved property as compared to a reference adenosine kinase.

[0357] In some embodiments, the engineered adenosine kinase has increased activity on a nucleoside substrate as compared to the reference adenosine kinase. In some embodiments, the engineered adenosine kinase has at least 1.1, 1.2, 1.3, 1.4, 1.5, 2, 3, 4, 5, 10, 15, or 20 fold or more activity compared to the reference adenosine kinase. In some embodiments, the increased activity is on guanosine, adenosine, cytidine, uridine, or thymidine. Examples of increased activity on nucleosides is presented in the Examples.

[0358] In some embodiments, the engineered adenosine kinase has increased activity (e.g., product formation) on cytidine or guanosine. In some embodiments, the engineered adenosine kinase has at least 1.1, 1.2, 1.3, 1.4, 1.5, 2, 3, 4, 5, or 10 fold or more activity on cytidine and/or guanosine compared to the reference adenosine kinase.

[0359] In some embodiments, the engineered adenosine kinase is capable of converting nucleoside substrate to NMP product at greater than 30%, 40%, 50%, 60%, 70%, 80%, 85%, 90%, 91%, 92%, 93%, 94%, 95%, 96%, 97%, 98%, or 99%. In some embodiments, the engineered adenosine kinase is capable of converting substrate adenosine, guanosine, cytidine, uridine, or thymidine to product AMP, GMP, CMP, UMP, or TMP, respectively, at greater than 30%, 40%, 50%, 60%, 70%, 80%, 85%, 90%, 91%, 92%, 93%, 94%, 95%, 96%, 97%, 98%, or 99%.

[0360] In some embodiments, the engineered kinase has increased activity (e.g., product formation) on 2′-fluoro modified nucleosides. In some embodiments, the 2′-F modified nucleosides are 2′-F-2′-deoxyadenosine, 2′-F-2′-deoxycytidine, 2′-F-2′-deoxyguanosine, and/or 2′-F-2′-deoxyuridine. In some embodiments, the engineered adenosine kinase has at least 1.1, 1.2, 1.3, 1.4, 1.5, 2, 3, 4, 5, or 10 fold or more activity on 2′-F modified nucleosides as compared to the reference adenosine kinase.

[0361] In some embodiments, the engineered kinase has increased activity (e.g., product formation) on 2′-O—CH₃ modified nucleosides. In some embodiments, the 2′-O—CH₃ modified nucleosides are 2′-O—CH₃ adenosine, 2′-O—CH₃ cytidine, 2′-O—CH₃ guanosine, and/or 2′-O—CH₃ uridine. In some embodiments, the engineered adenosine kinase has at least 1.1, 1.2, 1.3, 1.4, 1.5, 2, 3, 4, 5, or 10 fold or more activity on 2′-O—CH₃ modified nucleosides as compared to the reference adenosine kinase.

[0362] In some embodiments, the engineered adenosine kinase is capable of converting substrate 2′-fluoro-nucleoside to product 2′-fluoro-NMP at greater than 30%, 40%, 50%, 60%, 70%, 80%, 85%, 90%, 91%, 92%, 93%, 94%, 95%, 96%, 97%, 98%, or 99%. In some embodiments, the engineered adenosine kinase is capable of converting substrate 2′-fluoro-adenosine, 2′-fluoro-guanosine, 2′-fluoro-cytidine, 2′-fluoro-uridine, or 2′-fluoro-thymidine to product 2′-fluoro-AMP, 2′-fluoro-GMP, 2′-fluoro-CMP, 2′-fluoro-UMP, or 2′-fluoro-TMP, respectively, at greater than 30%, 40%, 50%, 60%, 70%, 80%, 85%, 90%, 91%, 92%, 93%, 94%, 95%, 96%, 97%, 98%, or 99%.

[0363] In some embodiments, the engineered adenosine kinase is capable of converting 2′-O-methyl-nucleoside substrate to product 2′-O-methyl-NMP at greater than 30%, 40%, 50%, 60%, 70%, 80%, 85%, 90%, 91%, 92%, 93%, 94%, 95%, 96%, 97%, 98%, or 99%. In some embodiments, the engineered adenosine kinase is capable of converting substrate 2′-O-methyl-adenosine, 2′-O-methyl-guanosine, 2′-O-methyl-cytidine, 2′-O-methyl-uridine, or 2′-O-methyl-thymidine to product 2′-O-methyl-AMP, 2′-O-methyl-GMP, 2′-O-methyl-CMP, 2′-O-methyl-UMP, or 2′-O-methyl-TMP, respectively, at greater than 30%, 40%, 50%, 60%, 70%, 80%, 85%, 90%, 91%, 92%, 93%, 94%, 95%, 96%, 97%, 98%, or 99%.

[0364] Exemplary conditions for the conversion of a nucleoside to the corresponding NMP, including the conversion of 2′-fluoro-nucleoside to 2′-fluoro NMP and the conversion of 2′-O-methyl nucleoside to 2′-O-methyl NMP are provided in the Examples.

[0365] In some embodiments, the engineered adenosine kinase has increased thermostability as compared to the reference adenosine kinase. In some embodiments, increased thermal stability is at condition of 45° C. for 60 min.

[0366] In some embodiments, the engineered adenosine kinase has an improved property selected from i) increased activity on unmodified nucleoside, ii) increased thermostability, iii) increased activity on cytidine and/or guanosine, iv) increased activity on 2′-F modified nucleosides, and v) increased activity on 2′-O—CH₃ modified nucleosides, or any combinations of i), ii), iii), iv), and v), compared to a reference adenosine kinase.

[0367] In some embodiments, for comparing the improved property, the reference adenosine kinase has an amino acid sequence corresponding to residues 12-321 of SEQ ID NO: 2, 90, 254, 370, 734, 896, 1196, 1366, 1382, 1464, 1568, 1616, 1668, 1766, 1826, 1918, or 1942, or an amino acid sequence corresponding to SEQ ID NO: 2, 90, 254, 370, 734, 896, 1196, 1366, 1382, 1464, 1568, 1616, 1668, 1766, 1826, 1918, or 1942. In some embodiments, the reference adenosine kinase has an amino acid sequence corresponding to residues 12-321 of SEQ ID NO: 2, or an amino acid sequence corresponding to SEQ ID NO: 2.

[0368] In some embodiments, the present disclosure further provides an adenosine kinase comprising an amino acid sequence having at least 70%, 75%, 80%, 81%, 82%, 83%, 84%, 85%, 86%, 87%, 88%, 89%, 90%, 91%, 92%, 93%, 94%, 95%, 96%, 97%, 98%, 99% or more sequence identity to
[0369] (a) a sequence corresponding to residues 12 to 339 of SEQ ID NO: 1818,
   [0370] a sequence corresponding to residues 12 to 339 of SEQ ID NO: 1820, or
[0371] (b) a sequence corresponding to SEQ ID NO: 2;
   [0372] a sequence corresponding to SEQ ID NO: 1818; or
   [0373] a sequence corresponding to SEQ ID NO: 1820.

[0374] In some embodiments, the present disclosure provides an adenosine kinase comprising an amino acid sequence comprising:
[0375] (a) residues 12 to 339 of SEQ ID NO: 1818, or
   [0376] residues 12 to 339 of SEQ ID NO: 1820,
[0377] (b) SEQ ID NO: 2;
   [0378] SEQ ID NO: 1818; or
   [0379] SEQ ID NO: 1820.

[0380] In some embodiments, the engineered adenosine kinase is provided in the form of a fusion polypeptide. In some embodiments, the engineered adenosine kinase is fused to variety of polypeptide sequences, such as, by way of example and not limitation, polypeptide tags that can be used for detection and/or purification. In some embodiments, the fusion protein or polypeptide of the engineered adenosine kinase comprises a glycine-histidine or histidine-tag (His-tag). In some embodiments, the fusion protein or polypeptide of the engineered adenosine kinase comprises a polylysine, for example, 2-12 lysine units, such as for conjugation to a support medium. In some embodiments, the fusion protein of the engineered adenosine kinase comprises an epitope tag, such as c-myc, FLAG, V5, or hemagglutinin (HA). In some embodiments, the fusion protein of the engineered adenosine kinase comprises a GST, SUMO, Strep, MBP, or GFP tag. In some embodiments, the fusion is to the amino (N—) terminus of engineered adenosine kinase polypeptide. In some embodiments, the fusion is to the carboxy (C—) terminus of the adenosine kinase polypeptide.

[0381] In some embodiments, the present disclosure further provides functional fragments or biologically active fragments of engineered adenosine kinase polypeptides described herein. Thus, for each and every embodiment herein of an engineered adenosine kinase, a functional fragment or biologically active fragment of the engineered adenosine kinase is provided herewith. In some embodiments, a functional fragment or biologically active fragments of an engineered adenosine kinase comprises at least about 90%, 91%, 92%, 93%, 94%, 95%, 96%, 97%, 98%, or 99% of the activity of the adenosine kinase polypeptide from which it was derived (i.e., the parent adenosine kinase). In some embodiments, functional fragments or biologically active fragments comprise at least about 90%, 91%, 92%, 93%, 94%, 95%, 96%, 97%, 98%, or 99% of the parent sequence of the adenosine kinase. In some embodiments the functional fragment will be truncated by less than 5, less than 10, less than 15, less than 10, less than 25, less than 30, less than 35, less than 40, less than 45, and less than 50 amino acids.

[0382] In some embodiments, a functional fragment of an engineered adenosine kinase herein comprises at least 70%, 75%, 80%, 81%, 82%, 83%, 84%, 85%, 90%, 91%, 92%, 93%, 94%, 95%, 96%, 97%, 98%, or 99% of the parent sequence of the engineered adenosine kinase. In some embodiments, the functional fragment will be truncated by less than 5, less than 10, less than 15, less than 10, less than 25, less than 30, less than 35, less than 40, less than 45, less than 50, less than 55, less than 60, less than 65, or less than 70 amino acids.

[0383] In some embodiments, the functional fragments or biologically active fragments of the engineered adenosine kinase polypeptide described herein include at least a mutation or mutation set in the amino acid sequence of an engineered adenosine kinase described herein. Accordingly, in some embodiments, the functional fragments or biologically active fragments of the engineered adenosine kinase displays the enhanced or improved property associated with the mutation or mutation set in the parent adenosine kinase.

[0384] In some embodiments, the engineered adenosine kinase is purified, as described herein. In some embodiments, the purified preparation has the engineered adenosine kinase at least 60%, 70%, 80%, 85%, 90%, or 95% greater of the protein content of the preparation.

[0385] In some embodiments, an engineered adenosine kinase described herein is provided immobilized on a substrate or support medium, such as a solid substrate, a porous substrate, a membrane, or particles. The polypeptide can be entrapped in matrixes or membranes. In some embodiments, matrices include polymeric materials such as calcium-alginate, agar, k-carrageenin, polyacrylamide, and collagen. In some embodiments, the solid matrices, includes, among others, activated carbon, porous ceramic, and diatomaceous earth. In some embodiments, the matrix is a particle, a membrane, or a fiber. Types of membranes include, among others, nylon, cellulose, polysulfone, or polyacrylate.

[0386] In some embodiments, the engineered adenosine kinase is immobilized on the surface of a support material. In some embodiments, the polypeptide is adsorbed on the support material. In some embodiments, the polypeptide is immobilized on the support material by covalent attachment.

[0387] Support materials include, among others, inorganic materials, such as alumina, silica, porous glass, ceramics, diatomaceous earth, clay, and bentonite, or organic materials, such as cellulose (CMC, DEAE-cellulose), starch, activated carbon, polyacrylamide, polymethacrylate, polyacrylate, polystyrene, and ion-exchange resins, such as Amberlite, Sephadex, and Dowex.

[0388] As further described below, solid supports useful for immobilizing the engineered polypeptides of the present disclosure include, but are not limited to, beads or resins comprising polymethacrylate or polyacrylate with epoxide functional groups, polymethacrylate or polyacrylate with amino epoxide functional groups, styrene/DVB copolymer or polymethacrylate or polyacrylate with octadecyl functional groups. In some embodiments, exemplary solid supports useful for immobilizing the engineered polypeptides of the present invention include, but are not limited to, EnginZyme (including, EziG-1, EziG-1, and EziG-3), chitosan beads, Eupergit C, and SEPABEADs (Mitsubishi) (including EC-EP, EC-HFA/S, EXA252, EXE119 and EXE120).

### Polynucleotides Encoding Engineered Polypeptides, Expression Vectors and Host Cells

[0389] In another aspect, the present disclosure provides recombinant polynucleotides encoding the engineered adenosine kinases described herein. In some embodiments, the recombinant polynucleotides are operably linked to one or more heterologous regulatory sequences that control gene expression to create a recombinant polynucleotide construct capable of expressing the engineered adenosine kinase. In some embodiments, an expression construct containing at least one heterologous polynucleotide encoding the engineered adenosine kinase polypeptide(s) is introduced into appropriate host cells to express the corresponding adenosine kinase polypeptide(s).

[0390] As will be apparent to the skilled artisan, availability of a protein sequence and the knowledge of the codons corresponding to the various amino acids provide a description of all the polynucleotides capable of encoding the subject polypeptides. The degeneracy of the genetic code, where the same amino acids are encoded by alternative or synonymous codons, allows an extremely large number of nucleic acids to be made, all of which encode an engineered adenosine kinase of the present disclosure. Thus, the present disclosure provides methods and compositions for the production of each and every possible variation of polynucleotides that could be made that encode the engineered adenosine kinase polypeptides described herein by selecting combinations based on the possible codon choices, and all such polynucleotide variants are to be considered specifically disclosed for any polypeptide described herein, including the amino acid sequences presented in the Examples (e.g., Tables 7.1, 7.2, 8.1, 9.1, 10.2, 11.2, 12.2, 13.2, 14.2, 15.2, 16.2, 17.2, 18.2, 20.2, 21.2, 22.2, 23.2, 24.2, 25.2, 26.2, 27.2, 28.2, 29.2, 30.2, 31.2, 32.2, 33.2, 34.2, 35.2, 36.2, 37.2, 38.2, 39.2, 40.2, 41.2, 42.2, 43.2, 45.2, 46.2, 47.2, 48.2, 49.2 and 50.2) and in the Sequence Listing.

[0391] In some embodiments, the codons are preferably optimized for utilization by the chosen host cell for protein production. In some embodiments, preferred codons in bacteria are used for expression in bacteria. In some embodiments, preferred codons in fungal cells are used for expression in fungal cells. In some embodiments, preferred codons in insect cells are used for expression in insect cells. In some embodiments, preferred codons in mammalian cells are used for expression in mammalian cells. In some embodiments, codon optimized polynucleotides encoding an engineered adenosine kinase polypeptide described herein contain preferred codons at about 40%, 50%, 60%, 70%, 80%, 90%, or greater than 90% of the codon positions in the full-length coding region.

[0392] Accordingly, in some embodiments, a recombinant polynucleotide of the present disclosure comprises a polynucleotide sequence encoding an engineered adenosine kinase polypeptide described herein. In some embodiments, the polynucleotide sequence of the recombinant polynucleotide has preferred codons for expression (e.g., codon optimized). In some embodiments, the polynucleotide sequence of the recombinant polynucleotide is codon optimized for expression in eukaryotic or prokaryotic cells, as further discussed below.

[0393] In some embodiments, the recombinant polynucleotide comprises a polynucleotide sequence encoding an engineered adenosine kinase comprising an amino acid sequence having at least 70%, 75%, 80%, 81%, 82%, 83%, 84%, 85%, 86%, 87%, 88%, 89%, 90%, 91%, 92%, 93%, 94%, 95%, 96%, 97%, 98%, 99%, or more sequence identity to a reference sequence corresponding to amino acid residues 12-321 of an even-numbered SEQ ID NO. of SEQ ID NOs: 2-1142, 1194-1808 and 1818-2124, or to a reference sequence corresponding to an even-numbered SEQ ID NO. of SEQ ID NOs: 2-1142, 1194-1808 and 1818-2124, wherein the amino acid sequence comprises one or more substitutions relative to the reference sequence corresponding to amino acid residues 12-321 of SEQ ID NO: 2, 90, 254, 370, 734, 896, 1196, 1366, 1382, 1464, 1568, 1616, 1668, 1766, 1826, 1918, or 1942, or relative to the reference sequence corresponding to SEQ ID NO: 2, 90, 254, 370, 734, 896, 1196, 1366, 1382, 1464, 1568, 1616, 1668, 1766, 1826, 1918, or 1942.

[0394] In some embodiments, the recombinant polynucleotide comprises a polynucleotide sequence encoding an engineered adenosine kinase comprising an amino acid sequence having at least 70%, 75%, 80%, 81%, 82%, 83%, 84%, 85%, 86%, 87%, 88%, 89%, 90%, 91%, 92%, 93%, 94%, 95%, 96%, 97%, 98%, 99%, or more sequence identity to a reference sequence corresponding to amino acid residues 12-321 of SEQ ID NO: 2, 90, 254, 370, 734, 896, 1196, 1366, 1382, 1464, 1568, 1616, 1668, 1766, 1826, 1918, or 1942, or to a reference sequence corresponding to SEQ ID NO: 2, 90, 254, 370, 734, 896, 1196, 1366, 1382, 1464, 1568, 1616, 1668, 1766, 1826, 1918, or 1942, wherein the amino acid sequence comprises one or more substitutions relative to the reference sequence corresponding to amino acid residues 12-321 of SEQ ID NO: 2, 90, 254, 370, 734, 896, 1196, 1366, 1382, 1464, 1568, 1616, 1668, 1766, 1826, 1918, or 1942, or relative to the reference sequence corresponding to SEQ ID NO: 2, 90, 254, 370, 734, 896, 1196, 1366, 1382, 1464, 1568, 1616, 1668, 1766, 1826, 1918, or 1942.

[0395] In some embodiments, the recombinant polynucleotide comprises a polynucleotide sequence encoding an engineered adenosine kinase comprising an amino acid sequence having at least 70%, 75%, 80%, 81%, 82%, 83%, 84%, 85%, 86%, 87%, 88%, 89%, 90%, 91%, 92%, 93%, 94%, 95%, 96%, 97%, 98%, 99%, or more sequence identity to the reference sequence corresponding to amino acid residues 12-321 of SEQ ID NO: 2, or to the reference sequence corresponding to SEQ ID NO: 2, wherein the amino acid sequence comprises one or more substitutions relative to the reference sequence corresponding to amino acid residues 12-321 of SEQ ID NO: 2, or relative to the reference sequence corresponding to SEQ ID NO: 2.

[0396] In some embodiments, the recombinant polynucleotide comprises a polynucleotide sequence encoding an engineered adenosine kinase comprising an amino acid sequence having at least 70%, 75%, 80%, 81%, 82%, 83%, 84%, 85%, 86%, 87%, 88%, 89%, 90%, 91%, 92%, 93%, 94%, 95%, 96%, 97%, 98%, 99%, or more sequence identity to the reference sequence corresponding to amino acid residues 12-321 of SEQ ID NO: 90, 254, 370, 734, 896, 1196, 1366, 1382, 1464, 1568, 1616, 1668, 1766, 1826, 1918, or 1942, or to the reference sequence corresponding to SEQ ID NO: 90, 254, 370, 734, 896, 1196, 1366, 1382, 1464, 1568, 1616, 1668, 1766, 1826, 1918, or 1942, wherein the amino acid sequence comprises one or more substitutions relative to the reference sequence corresponding to amino acid residues 12-321 of SEQ ID NO: 2, or relative to the reference sequence corresponding to SEQ ID NO: 2.

[0397] In some embodiments, the recombinant polynucleotide comprises a polynucleotide sequence encoding an engineered adenosine kinase comprising an amino acid sequence having at least 70%, 75%, 80%, 81%, 82%, 83%, 84%, 85%, 86%, 87%, 88%, 89%, 90%, 91%, 92%, 93%, 94%, 95%, 96%, 97%, 98%, 99%, or more sequence identity to a reference sequence corresponding to amino acid residues 12-321 of an even-numbered SEQ ID NO. of SEQ ID NOs: 4-1142, 1194-1808 and 1818-2124, or to a reference sequence corresponding to an even-numbered SEQ ID NO. of SEQ ID NOs: 4-1142, 1194-1808 and 1818-2124, wherein the amino acid sequence comprises one or more substitutions relative to the reference sequence corresponding to amino acid residues 12-321 of SEQ ID NO: 2, or relative to the reference sequence corresponding to SEQ ID NO: 2.

[0398] In some embodiments, the recombinant polynucleotide comprises a polynucleotide sequence encoding an engineered adenosine kinase comprising an amino acid sequence comprising at least a substitution at amino acid position 13, 14, 20, 21, 23, 24, 26, 27, 28, 29, 30, 31, 33, 34, 35, 38, 40, 41, 42, 43, 46, 49, 50, 51, 52, 53, 54, 55, 56, 64, 67, 73, 74, 77, 79, 80, 83, 86, 87, 89, 90, 91, 92, 93, 94, 100, 101, 102, 103, 104, 106, 107, 108, 109, 111, 112, 113, 116, 119, 120, 121, 126, 128, 129, 130, 133, 134, 136, 141, 144, 146, 147, 151, 152, 155, 156, 157, 160, 162, 163, 164, 167, 168, 169, 170, 171, 172, 177, 179, 180, 181, 182, 183, 185, 187, 188, 190, 191, 192, 194, 195, 196, 197, 202, 206, 207, 208, 210, 211, 212, 215, 216, 217, 218, 221, 222, 225, 229, 231, 232, 233, 234, 236, 237, 238, 239, 240, 241, 242, 243, 244, 245, 246, 247, 248, 249, 250, 251, 252, 253, 254, 255, 256, 258, 265, 271, 274, 275, 276, 287, 288, 291, 292, 293, 294, 295, 296, 299, 303, 305, 307, 308, 310, 311, 312, 314, 315, 316, 317, or 320, or combinations thereof, wherein the amino acid positions are relative to the reference sequence corresponding to amino acid residues 12-321 of SEQ ID NO: 2, or relative to the reference sequence corresponding to SEQ ID NO: 2.

[0399] In some embodiments, the recombinant polynucleotide comprises a polynucleotide sequence encoding an engineered adenosine kinase comprising an amino acid sequence comprising at least a substitution at amino acid position 24, 27, 31, 40, 43, 51, 52, 74, 77, 79, 109, 113, 119, 121, 126, 129, 169, 181, 185, 207, 211, 233, 234, 237, 239, 244, 246, 249, 251, 252, 253, 276, 299, 305, 312, or 316, or combinations thereof, wherein the amino acid positions are relative to the reference sequence corresponding to amino acid residues 12-321 of SEQ ID NO: 2, or relative to the reference sequence corresponding to SEQ ID NO: 2.

[0400] In some embodiments, the recombinant polynucleotide comprises a polynucleotide sequence encoding an engineered adenosine kinase comprising an amino acid sequence comprising at least a substitution or substitution set at amino acid position(s) 109/111, 104/111, 38, 40, 111, 55/316, 258, 106/111, 103/111, 121, 207, 316, 43, 254, 233, 130,249, 107/111, 253, 210, 136/249, 208, 34,211, 308, 181, 248, 56, 89, 67, 111/121/233/316, 111/121/181/211/233/248/308/316, 53/111/121/181/211/233/248/308/316, 53/111/121/181/211/233/248/308/316/320, 53/86/111/121/169/181/211/233/248/308/316/320, or 53/77/79/86/111/121/169/170/181/211/233/234/248/308/316/320, wherein the amino acid positions are relative to the reference sequence corresponding to amino acid residues 12-321 of SEQ ID NO: 2, or relative to the reference sequence corresponding to SEQ ID NO: 2.

[0401] In some embodiments, the recombinant polynucleotide comprises a polynucleotide sequence encoding an engineered adenosine kinase comprising an amino acid sequence comprising at least substitution at an amino acid position set forth in Tables 7.1, 7.2, 8.1, 9.1, 10.2, 11.2, 12.2, 13.2, 14.2, 15.2, 16.2, 17.2, 18.2, 20.2, 21.2, 22.2, 23.2, 24.2, 25.2, 26.2, 27.2, 28.2, 29.2, 30.2, 31.2, 32.2, 33.2, 34.2, 35.2, 36.2, 37.2, 38.2, 39.2, 40.2, 41.2, 42.2, 43.2, 45.2, 46.2, 47.2, 48.2, 49.2 and 50.2, wherein the amino acid positions are relative to the reference sequence corresponding to amino acid residues 12-321 of SEQ ID NO: 2, or relative to the reference sequence corresponding to SEQ ID NO: 2.

[0402] In some embodiments, the recombinant polynucleotide comprises a polynucleotide sequence encoding an engineered adenosine kinase comprising an amino acid sequence comprising at least one substitution set forth in Tables 7.1, 7.2, 8.1, 9.1, 10.2, 11.2, 12.2, 13.2, 14.2, 15.2, 16.2, 17.2, 18.2, 20.2, 21.2, 22.2, 23.2, 24.2, 25.2, 26.2, 27.2, 28.2, 29.2, 30.2, 31.2, 32.2, 33.2, 34.2, 35.2, 36.2, 37.2, 38.2, 39.2, 40.2, 41.2, 42.2, 43.2, 45.2, 46.2, 47.2, 48.2, 49.2 and 50.2, wherein the amino acid positions are relative to the reference sequence corresponding to amino acid residues 12-321 of SEQ ID NO: 2, or relative to the reference sequence corresponding to SEQ ID NO: 2.

[0403] In some embodiments, the recombinant polynucleotide comprises a polynucleotide sequence encoding an engineered adenosine kinase comprising an amino acid sequence comprising at least a substitution or substitution set at amino acid position(s) set forth in Tables 7.1, 7.2, 8.1, 9.1, 10.2, 11.2, 12.2, 13.2, 14.2, 15.2, 16.2, 17.2, 18.2, 20.2, 21.2, 22.2, 23.2, 24.2, 25.2, 26.2, 27.2, 28.2, 29.2, 30.2, 31.2, 32.2, 33.2, 34.2, 35.2, 36.2, 37.2, 38.2, 39.2, 40.2, 41.2, 42.2, 43.2, 45.2, 46.2, 47.2, 48.2, 49.2 and 50.2, wherein the amino acid positions are relative to the reference sequence corresponding to amino acid residues 12-321 of SEQ ID NO: 2, or relative to the reference sequence corresponding to SEQ ID NO: 2.

[0404] In some embodiments, the recombinant polynucleotide comprises a polynucleotide sequence encoding an engineered adenosine kinase comprising an amino acid sequence comprising at least a substitution or substitution set of an engineered adenosine kinase variant set forth in Tables 7.1, 7.2, 8.1, 9.1, 10.2, 11.2, 12.2, 13.2, 14.2, 15.2, 16.2, 17.2, 18.2, 20.2, 21.2, 22.2, 23.2, 24.2, 25.2, 26.2, 27.2, 28.2, 29.2, 30.2, 31.2, 32.2, 33.2, 34.2, 35.2, 36.2, 37.2, 38.2, 39.2, 40.2, 41.2, 42.2, 43.2, 45.2, 46.2, 47.2, 48.2, 49.2 and 50.2, wherein the amino acid positions are relative to the reference sequence corresponding to amino acid residues 12-321 of SEQ ID NO: 2, or relative to the reference sequence corresponding to SEQ ID NO: 2.

[0405] In some embodiments, the recombinant polynucleotide comprises a polynucleotide sequence encoding an engineered adenosine kinase comprising an amino acid sequence having at least 70%, 75%, 80%, 81%, 82%, 83%, 84%, 85%, 86%, 87%, 88%, 89%, 90%, 91%, 92%, 93%, 94%, 95%, 96%, 97%, 98%, 99% or more sequence identity to a reference amino acid sequence comprising a substitution or substitution set of an engineered adenosine kinase variant set forth in Tables 7.1, 7.2, 8.1, 9.1, 10.2, 11.2, 12.2, 13.2, 14.2, 15.2, 16.2, 17.2, 18.2, 20.2, 21.2, 22.2, 23.2, 24.2, 25.2, 26.2, 27.2, 28.2, 29.2, 30.2, 31.2, 32.2, 33.2, 34.2, 35.2, 36.2, 37.2, 38.2, 39.2, 40.2, 41.2, 42.2, 43.2, 45.2, 46.2, 47.2, 48.2, 49.2 and 50.2, wherein the amino acid positions are relative to the reference sequence corresponding to amino acid residues 12-321 of SEQ ID NO: 2, or relative to the reference sequence corresponding to SEQ ID NO: 2.

[0406] In some embodiments, the recombinant polynucleotide comprises a polynucleotide sequence encoding an engineered adenosine kinase comprising an amino acid sequence having at least 70%, 75%, 80%, 81%, 82%, 83%, 84%, 85%, 86%, 87%, 88%, 89%, 90%, 91%, 92%, 93%, 94%, 95%, 96%, 97%, 98%, 99%, or more sequence identity to the reference sequence corresponding to residues 12-321 of SEQ ID NO: 90, 254, 370, 734, 896, 1196, 1366, 1382, 1464, 1568, 1616, 1668, 1766, 1826, 1918, or 1942, or to the reference sequence corresponding to SEQ ID NO: 90, 254, 370, 734, 896, 1196, 1366, 1382, 1464, 1568, 1616, 1668, 1766, 1826, 1918, or 1942.

[0407] In some embodiments, the recombinant polynucleotide comprises a polynucleotide sequence encoding an engineered adenosine kinase comprising an amino acid sequence having at least 70%, 75%, 80%, 81%, 82%, 83%, 84%, 85%, 86%, 87%, 88%, 89%, 90%, 91%, 92%, 93%, 94%, 95%, 96%, 97%, 98%, 99%, or more sequence identity to a reference sequence corresponding to residues 12-321 of an even-numbered SEQ ID NO. of SEQ ID NOs: 4-1142, 1194-1808 and 1818-2124, or to a reference sequence corresponding to an even-numbered SEQ ID NO. of SEQ ID NOs: 4-1142, 1194-1808 and 1818-2124.

[0408] In some embodiments, the recombinant polynucleotide comprises a polynucleotide sequence encoding an engineered adenosine kinase comprising an amino acid sequence having at least 70%, 75%, 80%, 81%, 82%, 83%, 84%, 85%, 86%, 87%, 88%, 89%, 90%, 91%, 92%, 93%, 94%, 95%, 96%, 97%, 98%, 99%, or more sequence identity to the reference sequence corresponding to residues 12-321 of SEQ ID NO: 90, 254, 370, 734, 896, 1196, 1366, 1382, 1464, 1568, 1616, 1668, 1766, 1826, 1918, or 1942, or to the reference sequence corresponding to SEQ ID NO: 90, 254, 370, 734, 896, 1196, 1366, 1382, 1464, 1568, 1616, 1668, 1766, 1826, 1918, or 1942, wherein the amino acid sequence comprises one or more substitutions relative to the reference sequence corresponding to residues 12-321 of SEQ ID NO: 90, 254, 370, 734, 896, 1196, 1366, 1382, 1464, 1568, 1616, 1668, 1766, 1826, 1918, or 1942, or relative to the reference sequence corresponding to SEQ ID NO: 90, 254, 370, 734, 896, 1196, 1366, 1382, 1464, 1568, 1616, 1668, 1766, 1826, 1918, or 1942.

[0409] In some embodiments, the recombinant polynucleotide comprises a polynucleotide sequence encoding an engineered adenosine kinase comprising an amino acid sequence having at least 70%, 75%, 80%, 81%, 82%, 83%, 84%, 85%, 86%, 87%, 88%, 89%, 90%, 91%, 92%, 93%, 94%, 95%, 96%, 97%, 98%, 99%, or more sequence identity to the reference sequence corresponding to residues 12-321 of an even-numbered SEQ ID NO. of SEQ ID NOs: 4-1142, 1194-1808 and 1818-2124, or to the reference sequence corresponding to an even-numbered SEQ ID NO. of SEQ ID NOs: 4-1142, 1194-1808 and 1818-2124, wherein the amino acid sequence comprises one or more substitutions relative to the reference sequence corresponding to residues 12-321 of SEQ ID NO: 90, 254, 370, 734, 896, 1196, 1366, 1382, 1464, 1568, 1616, 1668, 1766, 1826, 1918, or 1942, or relative to the reference sequence corresponding to SEQ ID NO: 90, 254, 370, 734, 896, 1196, 1366, 1382, 1464, 1568, 1616, 1668, 1766, 1826, 1918, or 1942.

[0410] In some embodiments, the recombinant polynucleotide comprises a polynucleotide sequence encoding an engineered adenosine kinase comprising an amino acid sequence comprising at least a substitution at amino acid position 13, 14, 20, 21, 23, 24, 27, 29, 30, 31, 33, 34, 35, 38, 40, 41, 42, 43, 49, 50, 51, 52, 53, 54, 55, 56, 64, 67, 73, 74, 77, 79, 80, 83, 86, 87, 89, 90, 91, 92, 93, 94, 100, 101, 102, 103, 104, 106, 107, 108, 109, 111, 112, 113, 116, 119, 120, 121, 126, 128, 129, 130, 133, 134, 136, 141, 144, 146, 147, 151, 152, 155, 156, 157, 160, 162, 163, 164, 167, 168, 169, 170, 171, 172, 177, 180, 181, 182, 183, 185, 187, 188, 190, 191, 192, 194, 195, 196, 197, 202, 206, 207, 208, 210, 211, 215, 216, 217, 218, 221, 222, 225, 229, 231, 232, 233, 234, 236, 237, 238, 239, 240, 241, 242, 243, 244, 245, 246, 247, 248, 249, 250, 251, 252, 253, 254, 255, 256, 258, 265, 271, 276, 287, 288, 291, 292, 294, 295, 296, 299, 303, 305, 307, 308, 310, 311, 312, 314, 316, 317, or 320, or combinations thereof, wherein the amino acid positions are relative to the reference sequence corresponding to amino acid residues 12-321 of SEQ ID NO: 90, 254, 370, 734, 896, 1196, 1366, 1382, 1464, 1568, 1616, 1668, 1766, 1826, 1918, or 1942, or relative to the reference sequence corresponding to SEQ ID NO: 90, 254, 370, 734, 896, 1196, 1366, 1382, 1464, 1568, 1616, 1668, 1766, 1826, 1918, or 1942.

[0411] In some embodiments, the recombinant polynucleotide comprises a polynucleotide sequence encoding an engineered adenosine kinase comprising an amino acid sequence comprising at least a substitution at amino acid position 24, 27, 31, 40, 43, 51, 52, 74, 77, 79, 109, 113, 119, 121, 126, 129, 169, 181, 185, 207, 211, 233, 234, 237,239, 244, 246, 249, 251, 252, 253, 276, 299, 305, 312, or 316, or combinations thereof, wherein the amino acid positions are relative to the reference sequence corresponding to amino acid residues 12-321 of SEQ ID NO: 90, 254, 370, 734, 896, 1196, 1366, 1382, 1464, 1568, 1616, 1668, 1766, 1826, 1918, or 1942, or relative to the reference sequence corresponding to SEQ ID NO: 90, 254, 370, 734, 896, 1196, 1366, 1382, 1464, 1568, 1616, 1668, 1766, 1826, 1918, or 1942.

[0412] In some embodiments, the recombinant polynucleotide comprises a polynucleotide sequence encoding an engineered adenosine kinase comprising an amino acid sequence having at least 70%, 75%, 80%, 81%, 82%, 83%, 84%, 85%, 86%, 87%, 88%, 89%, 90%, 91%, 92%, 93%, 94%, 95%, 96%, 97%, 98%, 99%, or more sequence identity to the reference sequence corresponding to residues 12-321 of SEQ ID NO: 90, or to the reference sequence corresponding to SEQ ID NO: 90, wherein the amino acid sequence comprises one or more substitutions relative to the reference sequence corresponding to residues 12-321 of SEQ ID NO: 90, or relative to the reference sequence corresponding to SEQ ID NO: 90.

[0413] In some embodiments, the recombinant polynucleotide comprises a polynucleotide sequence encoding an engineered adenosine kinase comprising an amino acid sequence having at least 70%, 75%, 80%, 81%, 82%, 83%, 84%, 85%, 86%, 87%, 88%, 89%, 90%, 91%, 92%, 93%, 94%, 95%, 96%, 97%, 98%, 99%, or more sequence identity to the reference sequence corresponding to residues 12-321 of an even-numbered SEQ ID NO. of SEQ ID NOs: 148-358, or to the reference sequence corresponding to an even-numbered SEQ ID NO. of SEQ ID NOs: 148-358, wherein the amino acid sequence comprises one or more substitutions relative to the reference sequence corresponding to residues 12-321 of SEQ ID NO: 90, or relative to the reference sequence corresponding to SEQ ID NO: 90.

[0414] In some embodiments, the recombinant polynucleotide comprises a polynucleotide sequence encoding an engineered adenosine kinase comprising an amino acid sequence comprising at least a substitution or substitution set at amino acid position(s) 111/233/316, 43/111/233/316, 109/181/316, 109/316, 111/233, 109/233/316, 38/208/211/308, 111/181/233/316, 109/111/233/316, 111/181/233/239/316, 111/233/239/316, 109/111/181/233/316, 111/181/316, 43/233, 109/111/316, 181/233, 34/211/248/249, 34/38/248/249, 34/308, 233/316, 43/233/316, 181/316, 34/249, 43/181/233/316, 34/38/103/116/253, 34, 40/43/109/181/233/316, 34/38/208/253, 103/249/253/308, 34/38/116/208, 38/249, 34/38/116/211/248/253/308, 43/109/316, 116/253, 43/111/181/316, 34/38/308, 109/111/181, 111/130/233, 233, 34/38/116/308, 109/233, 40/43/109/111/181/233/316, 109/130/181/233, 34/38/253, 253, 34/38/103/208/249, 103/208/210/253, 130/181/233/316, 109/111/130/181/233, 34/38/210/211/253/303, 103/116/208, 34/116/248/252/253, 34/38/103/210/211/249, 40/233/316, 34/38, 109/130/233, 111/130/181/233/316, 34/38/249/253, 34/38/208/248, 40/109/111/181/233/316, 130/316, 40/316, 38/116, 34/38/116, 38/116/208/210/249/253, 40/130/181/233/316, 103/248/249, or 103/248, wherein the amino acid positions are relative to the reference sequence corresponding to amino acid residues 12-321 of SEQ ID NO: 90, or relative to the reference sequence corresponding to SEQ ID NO: 90.

[0415] In some embodiments, the recombinant polynucleotide comprises a polynucleotide sequence encoding an engineered adenosine kinase comprising an amino acid sequence having at least 70%, 75%, 80%, 81%, 82%, 83%, 84%, 85%, 86%, 87%, 88%, 89%, 90%, 91%, 92%, 93%, 94%, 95%, 96%, 97%, 98%, 99%, or more sequence identity to the reference sequence corresponding to residues 12-321 of SEQ ID NO: 254, or to the reference sequence corresponding to SEQ ID NO: 254, wherein the amino acid sequence comprises one or more substitutions relative to the reference sequence corresponding to residues 12-321 of SEQ ID NO: 254, or relative to the reference sequence corresponding to SEQ ID NO: 254.

[0416] In some embodiments, the recombinant polynucleotide comprises a polynucleotide sequence encoding an engineered adenosine kinase comprising an amino acid sequence having at least 70%, 75%, 80%, 81%, 82%, 83%, 84%, 85%, 86%, 87%, 88%, 89%, 90%, 91%, 92%, 93%, 94%, 95%, 96%, 97%, 98%, 99%, or more sequence identity to the reference sequence corresponding to residues 12-321 of an even-numbered SEQ ID NO. of SEQ ID NOs: 360-592, or to the reference sequence corresponding to an even-numbered SEQ ID NO. of SEQ ID NOs: 360-592, wherein the amino acid sequence comprises one or more substitutions relative to the reference sequence corresponding to residues 12-321 of SEQ ID NO: 254, or relative to the reference sequence corresponding to SEQ ID NO: 254.

[0417] In some embodiments, the recombinant polynucleotide comprises a polynucleotide sequence encoding an engineered adenosine kinase comprising an amino acid sequence comprising at least a substitution or substitution set at amino acid position(s) 77/111/170/211/236, 77/111/211, 77/211, 53/77/170/211/320, 53/77/211/234/320, 77/79/211/316, 77/111/234/236/308, 111/170/211/234/236/248, 111/169/170/234/236/248, 77/211/248/320, 53/169/170/234/320, 111/211/234/236/248, 77, 53/77/111/170/248, 211/234/248, 77/86/170/211/234/308/320, 77/86, 53/111/170, 77/79/111, 53/77/111/169/236, 77/211/234, 211, 53/77, 86/169/234, 53/211/234/248, 111/169/170/236/248, 77/79/211, 77/79/169/170, 77/79/86/169/236, 79/211/248, 79/211, 53/86/211/234/236, 79/170/211, 308, 53/211, 169/234/236, 77/79/169/234/236, 53/77/79, 77/111, 53/234/236, 169/170, 53/77/79/169, 53/86/234/236, 53/169/234/236, 53/234, 77/79/86/170/211/234/236/308/320, 53/170, 77/248, 53/86, 252, 180, 129, 121, 255, 119, 256, 237, 249, 20, 234, 254, 56, 287, 317, 299, 229, 250, 295, 144/255, 291, 181, 233, 248, 231, 251, 128, 156, 247, 288, or 292, wherein the amino acid positions are relative to the reference sequence corresponding to residues 12-321 of SEQ ID NO: 254, or relative to the reference sequence corresponding to SEQ ID NO: 254.

[0418] In some embodiments, the recombinant polynucleotide comprises a polynucleotide sequence encoding an engineered adenosine kinase comprising an amino acid sequence having at least 70%, 75%, 80%, 81%, 82%, 83%, 84%, 85%, 86%, 87%, 88%, 89%, 90%, 91%, 92%, 93%, 94%, 95%, 96%, 97%, 98%, 99%, or more sequence identity to the reference sequence corresponding to residues 12-321 of SEQ ID NO: 370, or to the reference sequence corresponding to SEQ ID NO: 370, wherein the amino acid sequence comprises one or more substitutions relative to the reference sequence corresponding to residues 12-321 of SEQ ID NO: 370, or relative to the reference sequence corresponding to SEQ ID NO: 370.

[0419] In some embodiments, the recombinant polynucleotide comprises a polynucleotide sequence encoding an engineered adenosine kinase comprising an amino acid sequence having at least 70%, 75%, 80%, 81%, 82%, 83%, 84%, 85%, 86%, 87%, 88%, 89%, 90%, 91%, 92%, 93%, 94%, 95%, 96%, 97%, 98%, 99%, or more sequence identity to the reference sequence corresponding to residues 12-321 of an even-numbered SEQ ID NO. of SEQ ID NOs: 594-888, or to the reference sequence corresponding to an even-numbered SEQ ID NO. of SEQ ID NOs: 594-888, wherein the amino acid sequence comprises one or more substitutions relative to the reference sequence corresponding to residues 12-321 of SEQ ID NO: 370, or relative to the reference sequence corresponding to SEQ ID NO: 370.

[0420] In some embodiments, the recombinant polynucleotide comprises a polynucleotide sequence encoding an engineered adenosine kinase comprising an amino acid sequence comprising at least a substitution or substitution set at amino acid position(s) 299, 21, 113, 152, 169/255, 251, 294, 255, 202/211, 31, 129, 252, 27/64, 128, 248, 234, 288, 20, 111, 112, 181, 119, 64, 155, 256, 254, 292, 265, 177, 232, 120, 183, 234/252, 181/250/252/299, 119/181/234/250/299, 129/234/252, 119/129/234, 119/181/234/250/256/299, 119/181/250/252, 119/181/234/299, 234/250/252, 119/181/252/299, 129/181/234/299, 56/121/229, 181/255/299, 119/299, 119/250/255/299, 80/119/252, 119/129, 119/129/250, 181/234/252/299, 181/250/299, 252/299, 119/181/299, 119/129/299, 119/129/234/252, 119/129/234/250/299, 119/181/234/252, 129/234/255/299, 181/299, 250/252, 250/255/299, 119/234/299, 119/181/250, 56/237, 250/299, 119/234/255/256/299, 56/229/254, 119/129/181, 56/121/295/317, 119/181/250/255/256, 229, 250, 119/234, 20/229/237/317, 181/250, 119/255, 121/156/229, 56/121/237, 237/317, 56/295, 56/121/229/236/254/295, 56/254, 119/250/299, 229/237/295, 20/229/317, 229/295, 156/229, 56/121/229/237/295, 237/254, 20/56, 56/156, 56/156/254/295, 20/56/229, 119/129/181/234, 237, 56/156/229/237, 20/56/102/229, 119/181/234, 20/229, 56/121/156/237, 56/156/229, 20/56/156/229/237/295, 20/56/121/237/317, 156, 156/237/295, 20/56/121, 119/181, 20/56/229/254, 56, 121/254, 20/295, 255/256, 56/121/229/254, or 119/129/234/255/256, wherein the amino acid positions are relative to the reference sequence corresponding to residues 12-321 of SEQ ID NO: 370, or relative to the reference sequence corresponding to SEQ ID NO: 370.

[0421] In some embodiments, the recombinant polynucleotide comprises a polynucleotide sequence encoding an engineered adenosine kinase comprising an amino acid sequence having at least 70%, 75%, 80%, 81%, 82%, 83%, 84%, 85%, 86%, 87%, 88%, 89%, 90%, 91%, 92%, 93%, 94%, 95%, 96%, 97%, 98%, 99%, or more sequence identity to the reference sequence corresponding to residues 12-321 of SEQ ID NO: 734, or to the reference sequence corresponding to SEQ ID NO: 734, wherein the amino acid sequence comprises one or more substitutions relative to the reference sequence corresponding to residues 12-321 of SEQ ID NO: 734, or relative to the reference sequence corresponding to SEQ ID NO: 734.

[0422] In some embodiments, the recombinant polynucleotide comprises a polynucleotide sequence encoding an engineered adenosine kinase comprising an amino acid sequence having at least 70%, 75%, 80%, 81%, 82%, 83%, 84%, 85%, 86%, 87%, 88%, 89%, 90%, 91%, 92%, 93%, 94%, 95%, 96%, 97%, 98%, 99%, or more sequence identity to the reference sequence corresponding to residues 12-321 of an even-numbered SEQ ID NO. of SEQ ID NOs: 890-1142, 1192, and 1194, or to the reference sequence corresponding to an even-numbered SEQ ID NO. of SEQ ID NOs: 890-1142, 1192, and 1194, wherein the amino acid sequence comprises one or more substitutions relative to the reference sequence corresponding to residues 12-321 of SEQ ID NO: 734, or relative to the reference sequence corresponding to SEQ ID NO: 734.

[0423] In some embodiments, the recombinant polynucleotide comprises a polynucleotide sequence encoding an engineered adenosine kinase comprising an amino acid sequence comprising at least a substitution or substitution set at amino acid position(s) 56/229, 21/56, 181, 181/211/251, 181/211, 21/121/299, 229, 56, 56/169, 311, 52, 170, 31/181/211, 167, 303, 222, 43, 83, 113/181/211, 251, 187, 218, 181/251, 195, 121/229, 107, 141, 31/181, 307, 100, 169, 86, 90, 164, 310, 276, 35, 56/134, 211, 50, 41, 121/169/229, 74, 225, 106, 121, 31/113/181, 191, 190, 171, 168, 31/181/211/294, 73, 31/251, 31, 196, 89, 197, 242, 51, 103, 101, 147, 40, 146, 243, 56/121/229, or 31/211, wherein the amino acid positions are relative to the reference sequence corresponding to residues 12-321 of SEQ ID NO: 734, or relative to the reference sequence corresponding to SEQ ID NO: 734.

[0424] In some embodiments, the recombinant polynucleotide comprises a polynucleotide sequence encoding an engineered adenosine kinase comprising an amino acid sequence having at least 70%, 75%, 80%, 81%, 82%, 83%, 84%, 85%, 86%, 87%, 88%, 89%, 90%, 91%, 92%, 93%, 94%, 95%, 96%, 97%, 98%, 99%, or more sequence identity to the reference sequence corresponding to residues 12-321 of SEQ ID NO: 896, or to the reference sequence corresponding to SEQ ID NO: 896, wherein the amino acid sequence comprises one or more substitutions relative to the reference sequence corresponding to residues 12-321 of SEQ ID NO: 896, or relative to the reference sequence corresponding to SEQ ID NO: 896.

[0425] In some embodiments, the recombinant polynucleotide comprises a polynucleotide sequence encoding an engineered adenosine kinase comprising an amino acid sequence having at least 70%, 75%, 80%, 81%, 82%, 83%, 84%, 85%, 86%, 87%, 88%, 89%, 90%, 91%, 92%, 93%, 94%, 95%, 96%, 97%, 98%, 99%, or more sequence identity to the reference sequence corresponding to residues 12-321 of an even-numbered SEQ ID NO. of SEQ ID NOs: 1196-1344, or to the reference sequence corresponding to an even-numbered SEQ ID NO. of SEQ ID NOs: 1196-1344, wherein the amino acid sequence comprises one or more substitutions relative to the reference sequence corresponding to residues 12-321 of SEQ ID NO: 896, or relative to the reference sequence corresponding to SEQ ID NO: 896.

[0426] In some embodiments, the recombinant polynucleotide comprises a polynucleotide sequence encoding an engineered adenosine kinase comprising an amino acid sequence comprising at least a substitution or substitution set at amino acid position(s) 52/169, 52/141/169, 52, 41, 169, 51/52/211, 52/141/187, 51/52, 141, 41/103, 311, 167, 41/311, 133, 207, 14, 34, 241, 33, 27, 206, 217, 239, 13, 246, 162, 108, 160, 245, 92, 163, 104, 157, 215, 80, 54, 240, 210, 23, 53, 87, 188, 151, 29, 258, 238, 244, 192, 91, or 30, wherein the amino acid positions are relative to the reference sequence corresponding to residues 12-321 of SEQ ID NO: 896, or relative to the reference sequence corresponding to SEQ ID NO: 896.

[0427] In some embodiments, the recombinant polynucleotide comprises a polynucleotide sequence encoding an engineered adenosine kinase comprising an amino acid sequence having at least 70%, 75%, 80%, 81%, 82%, 83%, 84%, 85%, 86%, 87%, 88%, 89%, 90%, 91%, 92%, 93%, 94%, 95%, 96%, 97%, 98%, 99%, or more sequence identity to the reference sequence corresponding to residues 12-321 of SEQ ID NO: 1196, or to the reference sequence corresponding to SEQ ID NO: 1196, wherein the amino acid sequence comprises one or more substitutions relative to the reference sequence corresponding to residues 12-321 of SEQ ID NO: 1196, or relative to the reference sequence corresponding to SEQ ID NO: 1196.

[0428] In some embodiments, the recombinant polynucleotide comprises a polynucleotide sequence encoding an engineered adenosine kinase comprising an amino acid sequence having at least 70%, 75%, 80%, 81%, 82%, 83%, 84%, 85%, 86%, 87%, 88%, 89%, 90%, 91%, 92%, 93%, 94%, 95%, 96%, 97%, 98%, 99%, or more sequence identity to the reference sequence corresponding to residues 12-321 of an even-numbered SEQ ID NO. of SEQ ID NOs: 1346-1364, or to the reference sequence corresponding to an even-numbered SEQ ID NO. of SEQ ID NOs: 1346-1364, wherein the amino acid sequence comprises one or more substitutions relative to the reference sequence corresponding to residues 12-321 of SEQ ID NO: 1196, or relative to the reference sequence corresponding to SEQ ID NO: 1196.

[0429] In some embodiments, the recombinant polynucleotide comprises a polynucleotide sequence encoding an engineered adenosine kinase comprising an amino acid sequence comprising at least a substitution or substitution set at amino acid position(s) 24, 234/236, 251/252, 119, 234, or 231/234, wherein the amino acid positions are relative to the reference sequence corresponding to residues 12-321 of SEQ ID NO: 1196, or relative to the reference sequence corresponding to SEQ ID NO: 1196.

[0430] In some embodiments, the recombinant polynucleotide comprises a polynucleotide sequence encoding an engineered adenosine kinase comprising an amino acid sequence having at least 70%, 75%, 80%, 81%, 82%, 83%, 84%, 85%, 86%, 87%, 88%, 89%, 90%, 91%, 92%, 93%, 94%, 95%, 96%, 97%, 98%, 99%, or more sequence identity to the reference sequence corresponding to residues 12-321 of SEQ ID NO: 1366, or to the reference sequence corresponding to SEQ ID NO: 1366, wherein the amino acid sequence comprises one or more substitutions relative to the reference sequence corresponding to residues 12-321 of SEQ ID NO: 1366, or relative to the reference sequence corresponding to SEQ ID NO: 1366.

[0431] In some embodiments, the recombinant polynucleotide comprises a polynucleotide sequence encoding an engineered adenosine kinase comprising an amino acid sequence having at least 70%, 75%, 80%, 81%, 82%, 83%, 84%, 85%, 86%, 87%, 88%, 89%, 90%, 91%, 92%, 93%, 94%, 95%, 96%, 97%, 98%, 99%, or more sequence identity to the reference sequence corresponding to residues 12-321 of an even-numbered SEQ ID NO. of SEQ ID NOs: 1366-1410, or to the reference sequence corresponding to an even-numbered SEQ ID NO. of SEQ ID NOs: 1366-1410, wherein the amino acid sequence comprises one or more substitutions relative to the reference sequence corresponding to residues 12-321 of SEQ ID NO: 1366, or relative to the reference sequence corresponding to SEQ ID NO: 1366.

[0432] In some embodiments, the recombinant polynucleotide comprises a polynucleotide sequence encoding an engineered adenosine kinase comprising an amino acid sequence comprising at least a substitution or substitution set at amino acid position(s) 182, 121, 249, 129, 152, 237, 155, 121/129/207/237/249, 121/129/207/249, 27/121/207, 27/121/207/249, 121/207, 121/237, 121/249, 121/207/252, 27/121/129/207, 27/121/129/237, 207, 182/207, 121/129, or 121/237/252, wherein the amino acid positions are relative to the reference sequence corresponding to residues 12-321 of SEQ ID NO: 1366, or relative to the reference sequence corresponding to SEQ ID NO: 1366.

[0433] In some embodiments, the recombinant polynucleotide comprises a polynucleotide sequence encoding an engineered adenosine kinase comprising an amino acid sequence having at least 70%, 75%, 80%, 81%, 82%, 83%, 84%, 85%, 86%, 87%, 88%, 89%, 90%, 91%, 92%, 93%, 94%, 95%, 96%, 97%, 98%, 99%, or more sequence identity to the reference sequence corresponding to residues 12-321 of SEQ ID NO: 1382, or to the reference sequence corresponding to SEQ ID NO: 1382, wherein the amino acid sequence comprises one or more substitutions relative to the reference sequence corresponding to residues 12-321 of SEQ ID NO: 1382, or relative to the reference sequence corresponding to SEQ ID NO: 1382.

[0434] In some embodiments, the recombinant polynucleotide comprises a polynucleotide sequence encoding an engineered adenosine kinase comprising an amino acid sequence having at least 70%, 75%, 80%, 81%, 82%, 83%, 84%, 85%, 86%, 87%, 88%, 89%, 90%, 91%, 92%, 93%, 94%, 95%, 96%, 97%, 98%, 99%, or more sequence identity to the reference sequence corresponding to residues 12-321 of an even-numbered SEQ ID NO. of SEQ ID NOs: 1412-1564, or to the reference sequence corresponding to an even-numbered SEQ ID NO. of SEQ ID NOs: 1412-1564, wherein the amino acid sequence comprises one or more substitutions relative to the reference sequence corresponding to residues 12-321 of SEQ ID NO: 1382, or relative to the reference sequence corresponding to SEQ ID NO: 1382.

[0435] In some embodiments, the recombinant polynucleotide comprises a polynucleotide sequence encoding an engineered adenosine kinase comprising an amino acid sequence comprising at least a substitution or substitution set at amino acid position(s) 314, 221, 170, 40, 49, 73, 194, 195, 147, 218, 216, 90, 89, 42, 211, 106, 171, 93, 296, 100, 243, 172, 51, 271, 90/171/191, 90/271, 90/191, 90/147/171/271, 191, 51/90, 187/211, 171/191, 170/211, 49/51, 51/171/191/271, 40/211, 106/187/211, 211/221, 40/170/211, 49/51/90/147/171, 51/90/171, 51/171, 49/51/191, 49/51/90/147, 49/51/171/271, 106/211/221, 187/221, 49/171/191/314, 51/191/271, 51/90/171/191/271, 52/221, 90/171/191/271, 191/271, 170/221, 50/52, 50/52/106/211, 50/211/308, 50/52/106, 40/50/187/211/308, 50/52/106/170/187/308, 40/52/170, 50/106, 50/221/308, 49/51/90/271, 40/52/170/211, 187, 50/211/221/308, or 40/50/52/221, wherein the amino acid positions are relative to the reference sequence corresponding to residues 12-321 of SEQ ID NO: 1382, or relative to the reference sequence corresponding to SEQ ID NO: 1382.

[0436] In some embodiments, the recombinant polynucleotide comprises a polynucleotide sequence encoding an engineered adenosine kinase comprising an amino acid sequence having at least 70%, 75%, 80%, 81%, 82%, 83%, 84%, 85%, 86%, 87%, 88%, 89%, 90%, 91%, 92%, 93%, 94%, 95%, 96%, 97%, 98%, 99%, or more sequence identity to the reference sequence corresponding to residues 12-321 of SEQ ID NO: 1464, or to the reference sequence corresponding to SEQ ID NO: 1464, wherein the amino acid sequence comprises one or more substitutions relative to the reference sequence corresponding to residues 12-321 of SEQ ID NO: 1464, or relative to the reference sequence corresponding to SEQ ID NO: 1464.

[0437] In some embodiments, the recombinant polynucleotide comprises a polynucleotide sequence encoding an engineered adenosine kinase comprising an amino acid sequence having at least 70%, 75%, 80%, 81%, 82%, 83%, 84%, 85%, 86%, 87%, 88%, 89%, 90%, 91%, 92%, 93%, 94%, 95%, 96%, 97%, 98%, 99%, or more sequence identity to the reference sequence corresponding to residues 12-321 of an even-numbered SEQ ID NO. of SEQ ID NOs: 1566-1578, or to the reference sequence corresponding to an even-numbered SEQ ID NO. of SEQ ID NOs: 1566-1578, wherein the amino acid sequence comprises one or more substitutions relative to the reference sequence corresponding to residues 12-321 of SEQ ID NO: 1464, or relative to the reference sequence corresponding to SEQ ID NO: 1464.

[0438] In some embodiments, the recombinant polynucleotide comprises a polynucleotide sequence encoding an engineered adenosine kinase comprising an amino acid sequence comprising at least a substitution at amino acid position 317, 113, 21, 155, 126, 155, or 231, or combinations thereof, wherein the amino acid positions are relative to the reference sequence corresponding to residues 12-321 of SEQ ID NO: 1464, or relative to the reference sequence corresponding to SEQ ID NO: 1464.

[0439] In some embodiments, the recombinant polynucleotide comprises a polynucleotide sequence encoding an engineered adenosine kinase comprising an amino acid sequence having at least 70%, 75%, 80%, 81%, 82%, 83%, 84%, 85%, 86%, 87%, 88%, 89%, 90%, 91%, 92%, 93%, 94%, 95%, 96%, 97%, 98%, 99%, or more sequence identity to the reference sequence corresponding to residues 12-321 of SEQ ID NO: 1568, or to the reference sequence corresponding to SEQ ID NO: 1568, wherein the amino acid sequence comprises one or more substitutions relative to the reference sequence corresponding to residues 12-321 of SEQ ID NO: 1568, or relative to the reference sequence corresponding to SEQ ID NO: 1568.

[0440] In some embodiments, the recombinant polynucleotide comprises a polynucleotide sequence encoding an engineered adenosine kinase comprising an amino acid sequence having at least 70%, 75%, 80%, 81%, 82%, 83%, 84%, 85%, 86%, 87%, 88%, 89%, 90%, 91%, 92%, 93%, 94%, 95%, 96%, 97%, 98%, 99%, or more sequence identity to the reference sequence corresponding to residues 12-321 of an even-numbered SEQ ID NO. of SEQ ID NOs: 1580-1648, or to the reference sequence corresponding to an even-numbered SEQ ID NO. of SEQ ID NOs: 1580-1648, wherein the amino acid sequence comprises one or more substitutions relative to the reference sequence corresponding to residues 12-321 of SEQ ID NO: 1568, or relative to the reference sequence corresponding to SEQ ID NO: 1568.

[0441] In some embodiments, the recombinant polynucleotide comprises a polynucleotide sequence encoding an engineered adenosine kinase comprising an amino acid sequence comprising at least a substitution or substitution set at amino acid position(s) 246, 74, 185, 244, 164, 276, 43, 163, 217, 31, 43/276, 185/187/276, 43/187/222/276, 185/187/222/276, 187/276, 185/276, 164/222, 164/187/222/276, 43/222/276, 164/187/222, 222, 43/164/185/187/222, 222/276, 239, or 53, wherein the amino acid positions are relative to the reference sequence corresponding to residues 12-321 of SEQ ID NO: 1568, or relative to the reference sequence corresponding to SEQ ID NO: 1568.

[0442] In some embodiments, the recombinant polynucleotide comprises a polynucleotide sequence encoding an engineered adenosine kinase comprising an amino acid sequence having at least 70%, 75%, 80%, 81%, 82%, 83%, 84%, 85%, 86%, 87%, 88%, 89%, 90%, 91%, 92%, 93%, 94%, 95%, 96%, 97%, 98%, 99%, or more sequence identity to the reference sequence corresponding to residues 12-321 of SEQ ID NO: 1616, or to the reference sequence corresponding to SEQ ID NO: 1616, wherein the amino acid sequence comprises one or more substitutions relative to the reference sequence corresponding to residues 12-321 of SEQ ID NO: 1616, or relative to the reference sequence corresponding to SEQ ID NO: 1616.

[0443] In some embodiments, the recombinant polynucleotide comprises a polynucleotide sequence encoding an engineered adenosine kinase comprising an amino acid sequence having at least 70%, 75%, 80%, 81%, 82%, 83%, 84%, 85%, 86%, 87%, 88%, 89%, 90%, 91%, 92%, 93%, 94%, 95%, 96%, 97%, 98%, 99%, or more sequence identity to the reference sequence corresponding to residues 12-321 of an even-numbered SEQ ID NO. of SEQ ID NOs: 1650-1742, or to the reference sequence corresponding to an even-numbered SEQ ID NO. of SEQ ID NOs: 1650-1742, wherein the amino acid sequence comprises one or more substitutions relative to the reference sequence corresponding to residues 12-321 of SEQ ID NO: 1616, or relative to the reference sequence corresponding to SEQ ID NO: 1616.

[0444] In some embodiments, the recombinant polynucleotide comprises a polynucleotide sequence encoding an engineered adenosine kinase comprising an amino acid sequence comprising at least a substitution or substitution set at amino acid position(s) 74/239/244/246, 31/74/207/239/244/246, 31/246, 74/244, 31/74, 53/74/239/244/246, 31/74/207/244/246, 31/74/163/239/244, 31/74/239/244/246, 31/244/246, 31/53/164, 31/239/244, 239/246, 163/164/207/239/244/246, 31/74/163/246, 244, 31/239/244/246, 31/53/239/244/246, 31/207/244/246, 31, 31/53/74/239/246, 31/74/207, 31/163/207/244, 31/53/244, 31/163, 31/53/239/246, 74/207/239/244, 31/163/164/207/239/244/246, 74/207, 31/163/207/239/244, 31/74/163/164/207/246, 31/53/207/239, 207, 53/163/207/246, 31/53/74/163/207/246, 31/163/239/246/308, 31/74/207/239/308, or 163/207/246, wherein the amino acid positions are relative to the reference sequence corresponding to residues 12-321 of SEQ ID NO: 1616, or relative to the reference sequence corresponding to SEQ ID NO: 1616.

[0445] In some embodiments, the recombinant polynucleotide comprises a polynucleotide sequence encoding an engineered adenosine kinase comprising an amino acid sequence having at least 70%, 75%, 80%, 81%, 82%, 83%, 84%, 85%, 86%, 87%, 88%, 89%, 90%, 91%, 92%, 93%, 94%, 95%, 96%, 97%, 98%, 99%, or more sequence identity to the reference sequence corresponding to residues 12-321 of SEQ ID NO: 1668, or to the reference sequence corresponding to SEQ ID NO: 1668, wherein the amino acid sequence comprises one or more substitutions relative to the reference sequence corresponding to residues 12-321 of SEQ ID NO: 1668, or relative to the reference sequence corresponding to SEQ ID NO: 1668.

[0446] In some embodiments, the recombinant polynucleotide comprises a polynucleotide sequence encoding an engineered adenosine kinase comprising an amino acid sequence having at least 70%, 75%, 80%, 81%, 82%, 83%, 84%, 85%, 86%, 87%, 88%, 89%, 90%, 91%, 92%, 93%, 94%, 95%, 96%, 97%, 98%, 99%, or more sequence identity to the reference sequence corresponding to residues 12-321 of an even-numbered SEQ ID NO. of SEQ ID NOs: 1744-1808, or to the reference sequence corresponding to an even-numbered SEQ ID NO. of SEQ ID NOs: 1744-1808, wherein the amino acid sequence comprises one or more substitutions relative to the reference sequence corresponding to residues 12-321 of SEQ ID NO: 1668, or relative to the reference sequence corresponding to SEQ ID NO: 1668.

[0447] In some embodiments, the recombinant polynucleotide comprises a polynucleotide sequence encoding an engineered adenosine kinase comprising an amino acid sequence comprising at least a substitution or substitution set at amino acid position(s) 312, 305, 246, 89, 33, 218, 147, 27/218/305/312, 27/35/106/218/312, 27/218/312, 27/312, 27/305/312, 27/106/218/312, 27/218, 27/106/312, 35/305, 27/144/312, 27/218/305, 35/312, 27/106/218/305/312, 27/35/106/312, 106/218/305, 106/218/312, 27/106/305, 27/35/94/106/305/312, 35/218/312, 218/312, 27/106/218, 35/106/312, or 27/106, wherein the amino acid positions are relative to the reference sequence corresponding to residues 12-321 of SEQ ID NO: 1668, or relative to the reference sequence corresponding to SEQ ID NO: 1668.

[0448] In some embodiments, the recombinant polynucleotide comprises a polynucleotide sequence encoding an engineered adenosine kinase comprising an amino acid sequence having at least 70%, 75%, 80%, 81%, 82%, 83%, 84%, 85%, 86%, 87%, 88%, 89%, 90%, 91%, 92%, 93%, 94%, 95%, 96%, 97%, 98%, 99%, or more sequence identity to the reference sequence corresponding to residues 12-321 of SEQ ID NO: 1766, or to the reference sequence corresponding to SEQ ID NO: 1766, wherein the amino acid sequence comprises one or more substitutions relative to the reference sequence corresponding to residues 12-321 of SEQ ID NO: 1766, or relative to the reference sequence corresponding to SEQ ID NO: 1766.

[0449] In some embodiments, the recombinant polynucleotide comprises a polynucleotide sequence encoding an engineered adenosine kinase comprising an amino acid sequence having at least 70%, 75%, 80%, 81%, 82%, 83%, 84%, 85%, 86%, 87%, 88%, 89%, 90%, 91%, 92%, 93%, 94%, 95%, 96%, 97%, 98%, 99%, or more sequence identity to the reference sequence corresponding to residues 12-321 of an even-numbered SEQ ID NO. of SEQ ID NOs: 1818-1870, or to the reference sequence corresponding to an even-numbered SEQ ID NO. of SEQ ID NOs: 1818-1870, wherein the amino acid sequence comprises one or more substitutions relative to the reference sequence corresponding to residues 12-321 of SEQ ID NO: 1766, or relative to the reference sequence corresponding to SEQ ID NO: 1766.

[0450] In some embodiments, the recombinant polynucleotide comprises a polynucleotide sequence encoding an engineered adenosine kinase comprising an amino acid sequence comprising at least a substitution at amino acid position 34, 112, 126, 128, 155, 179, 183, 229, 236, 248, 253, 254, 292, 293, or 299, or combinations thereof, wherein the amino acid positions are relative to the reference sequence corresponding to amino acid residues 12-321 of SEQ ID NO: 1766, or relative to the reference sequence corresponding to SEQ ID NO: 1766.

[0451] In some embodiments, the recombinant polynucleotide comprises a polynucleotide sequence encoding an engineered adenosine kinase comprising an amino acid sequence having at least 70%, 75%, 80%, 81%, 82%, 83%, 84%, 85%, 86%, 87%, 88%, 89%, 90%, 91%, 92%, 93%, 94%, 95%, 96%, 97%, 98%, 99%, or more sequence identity to the reference sequence corresponding to residues 12-321 of SEQ ID NO: 1826, or to the reference sequence corresponding to SEQ ID NO: 1826, wherein the amino acid sequence comprises one or more substitutions relative to the reference sequence corresponding to residues 12-321 of SEQ ID NO: 1826, or relative to the reference sequence corresponding to SEQ ID NO: 1826.

[0452] In some embodiments, the recombinant polynucleotide comprises a polynucleotide sequence encoding an engineered adenosine kinase comprising an amino acid sequence having at least 70%, 75%, 80%, 81%, 82%, 83%, 84%, 85%, 86%, 87%, 88%, 89%, 90%, 91%, 92%, 93%, 94%, 95%, 96%, 97%, 98%, 99%, or more sequence identity to the reference sequence corresponding to residues 12-321 of an even-numbered SEQ ID NO. of SEQ ID NOs: 1872-1936, or to the reference sequence corresponding to an even-numbered SEQ ID NO. of SEQ ID NOs: 1872-1936, wherein the amino acid sequence comprises one or more substitutions relative to the reference sequence corresponding to residues 12-321 of SEQ ID NO: 1826, or relative to the reference sequence corresponding to SEQ ID NO: 1826.

[0453] In some embodiments, the recombinant polynucleotide comprises a polynucleotide sequence encoding an engineered adenosine kinase comprising an amino acid sequence comprising at least a substitution at amino acid position 14, 38, 46, 108, 146, 211, 243, 275, 303, 311, or 320, or combinations thereof, wherein the amino acid positions are relative to the reference sequence corresponding to amino acid residues 12-321 of SEQ ID NO: 1826, or relative to the reference sequence corresponding to SEQ ID NO: 1826.

[0454] In some embodiments, the recombinant polynucleotide comprises a polynucleotide sequence encoding an engineered adenosine kinase comprising an amino acid sequence comprising at least a substitution at amino acid position 94, 106, 108, 194, 274, 303, 307, or 315, or combinations thereof, wherein the amino acid positions are relative to the reference sequence corresponding to amino acid residues 12-321 of SEQ ID NO: 1826, or relative to the reference sequence corresponding to SEQ ID NO: 1826.

[0455] In some embodiments, the recombinant polynucleotide comprises a polynucleotide sequence encoding an engineered adenosine kinase comprising an amino acid sequence comprising at least a substitution or substitution set at amino acid position(s) 112/183/292/299, 112/292, 126/299, 155, 155/183/299, 155/299, 183/255/299, 183/299, 229/299, 255/299, or 292, wherein the amino acid positions are relative to the reference sequence corresponding to amino acid residues 12-321 of SEQ ID NO: 1826, or relative to the reference sequence corresponding to SEQ ID NO: 1826.

[0456] In some embodiments, the recombinant polynucleotide comprises a polynucleotide sequence encoding an engineered adenosine kinase comprising an amino acid sequence having at least 70%, 75%, 80%, 81%, 82%, 83%, 84%, 85%, 86%, 87%, 88%, 89%, 90%, 91%, 92%, 93%, 94%, 95%, 96%, 97%, 98%, 99%, or more sequence identity to the reference sequence corresponding to residues 12-321 of SEQ ID NO: 1918, or to the reference sequence corresponding to SEQ ID NO: 1918, wherein the amino acid sequence comprises one or more substitutions relative to the reference sequence corresponding to residues 12-321 of SEQ ID NO: 1918, or relative to the reference sequence corresponding to SEQ ID NO: 1918.

[0457] In some embodiments, the recombinant polynucleotide comprises a polynucleotide sequence encoding an engineered adenosine kinase comprising an amino acid sequence having at least 70%, 75%, 80%, 81%, 82%, 83%, 84%, 85%, 86%, 87%, 88%, 89%, 90%, 91%, 92%, 93%, 94%, 95%, 96%, 97%, 98%, 99%, or more sequence identity to the reference sequence corresponding to residues 12-321 of an even-numbered SEQ ID NO. of SEQ ID NOs: 1938-2010, or to the reference sequence corresponding to an even-numbered SEQ ID NO. of SEQ ID NOs: 1938-2010, wherein the amino acid sequence comprises one or more substitutions relative to the reference sequence corresponding to residues 12-321 of SEQ ID NO: 1918, or relative to the reference sequence corresponding to SEQ ID NO: 1918.

[0458] In some embodiments, the recombinant polynucleotide comprises a polynucleotide sequence encoding an engineered adenosine kinase comprising an amino acid sequence comprising at least a substitution at amino acid position 26, 27, 28, 29, 31, 33, 35, 42, 136, 212, 218, 237, 239, 245, 246, 252, 276, or 316, or combinations thereof, wherein the amino acid positions are relative to the reference sequence corresponding to amino acid residues 12-321 of SEQ ID NO: 1918, or relative to the reference sequence corresponding to SEQ ID NO: 1918.

[0459] In some embodiments, the recombinant polynucleotide comprises a polynucleotide sequence encoding an engineered adenosine kinase comprising an amino acid sequence having at least 70%, 75%, 80%, 81%, 82%, 83%, 84%, 85%, 86%, 87%, 88%, 89%, 90%, 91%, 92%, 93%, 94%, 95%, 96%, 97%, 98%, 99%, or more sequence identity to the reference sequence corresponding to residues 12-321 of SEQ ID NO: 1942, or to the reference sequence corresponding to SEQ ID NO: 1942, wherein the amino acid sequence comprises one or more substitutions relative to the reference sequence corresponding to residues 12-321 of SEQ ID NO: 1942, or relative to the reference sequence corresponding to SEQ ID NO: 1942.

[0460] In some embodiments, the recombinant polynucleotide comprises a polynucleotide sequence encoding an engineered adenosine kinase comprising an amino acid sequence having at least 70%, 75%, 80%, 81%, 82%, 83%, 84%, 85%, 86%, 87%, 88%, 89%, 90%, 91%, 92%, 93%, 94%, 95%, 96%, 97%, 98%, 99%, or more sequence identity to the reference sequence corresponding to residues 12-321 of an even-numbered SEQ ID NO. of SEQ ID NOs: 2012-2124, or to the reference sequence corresponding to an even-numbered SEQ ID NO. of SEQ ID NOs: 2012-2124, wherein the amino acid sequence comprises one or more substitutions relative to the reference sequence corresponding to residues 12-321 of SEQ ID NO: 1942, or relative to the reference sequence corresponding to SEQ ID NO: 1942.

[0461] In some embodiments, the recombinant polynucleotide comprises a polynucleotide sequence encoding an engineered adenosine kinase comprising an amino acid sequence comprising at least a substitution or substitution set at amino acid position(s) 26/27, 26/27/28, 26/27/28/31, 26/27/28/245, 26/28/31, 27, 27/28, 27/28/29/126, 27/29, 27/29/126, 27/29/237, 27/29/245, 27/31/126/245, 27/31/155, 27/126, 27/126/155, 27/126/237, 27/126/237/245, 27/237, 27/245, 28, 28/31, 28/31/239, 28/42/126/245, 28/42/245, 28/239, 29/31, 29/31/126/239, 30/31/33/35/126/218, 30/31/33/126/276/316, 30/33/35, 31/33/218/276, 31/126, 31/126/155, 33, 33/126/239, 42, 126, 126/155, 126/155/237, 126/155/239/276, 126/155/239/316, 126/239, 126/239/316, 126/245, 126/316, 155/276/316, 155/316, 218, 218/239/316, 239, 245, 252/276, or 316, wherein the amino acid positions are relative to the reference sequence corresponding to amino acid residues 12-321 of SEQ ID NO: 1942, or relative to the reference sequence corresponding to SEQ ID NO: 1942.

[0462] In some embodiments, the recombinant polynucleotide comprises a polynucleotide sequence encoding an engineered adenosine kinase comprising an amino acid sequence comprising at least a substitution at an amino acid position set forth in Tables 7.1, 7.2, 8.1, 9.1, 10.2, 11.2, 12.2, 13.2, 14.2, 15.2, 16.2, 17.2, 18.2, 20.2, 21.2, 22.2, 23.2, 24.2, 25.2, 26.2, 27.2, 28.2, 29.2, 30.2, 31.2, 32.2, 33.2, 34.2, 35.2, 36.2, 37.2, 38.2, 39.2, 40.2, 41.2, 42.2, 43.2, 45.2, 46.2, 47.2, 48.2, 49.2 and 50.2, wherein the amino acid positions are relative to the reference sequence corresponding to amino acid residues 12-321 of SEQ ID NO: 2, 90, 254, 370, 734, 896, 1196, 1366, 1382, 1464, 1568, 1616, 1668, 1766, 1826, 1918, or 1942, or relative to the reference sequence corresponding to SEQ ID NO: 2, 90, 254, 370, 734, 896, 1196, 1366, 1382, 1464, 1568, 1616, 1668, 1766, 1826, 1918, or 1942.

[0463] In some embodiments, the recombinant polynucleotide comprises a polynucleotide sequence encoding an engineered adenosine kinase comprising an amino acid sequence comprising at least one substitution set forth in Tables 7.1, 7.2, 8.1, 9.1, 10.2, 11.2, 12.2, 13.2, 14.2, 15.2, 16.2, 17.2, 18.2, 20.2, 21.2, 22.2, 23.2, 24.2, 25.2, 26.2, 27.2, 28.2, 29.2, 30.2, 31.2, 32.2, 33.2, 34.2, 35.2, 36.2, 37.2, 38.2, 39.2, 40.2, 41.2, 42.2, 43.2, 45.2, 46.2, 47.2, 48.2, 49.2 and 50.2, wherein the amino acid positions are relative to the reference sequence corresponding to amino acid residues 12-321 of SEQ ID NO: 2, 90, 254, 370, 734, 896, 1196, 1366, 1382, 1464, 1568, 1616, 1668, 1766, 1826, 1918, or 1942, or relative to the reference sequence corresponding to SEQ ID NO: 2, 90, 254, 370, 734, 896, 1196, 1366, 1382, 1464, 1568, 1616, 1668, 1766, 1826, 1918, or 1942.

[0464] In some embodiments, the recombinant polynucleotide comprises a polynucleotide sequence encoding an engineered adenosine kinase comprising an amino acid sequence comprising at least a substitution or substitution set at amino acid position(s) set forth in Tables 7.1, 7.2, 8.1, 9.1, 10.2, 11.2, 12.2, 13.2, 14.2, 15.2, 16.2, 17.2, 18.2, 20.2, 21.2, 22.2, 23.2, 24.2, 25.2, 26.2, 27.2, 28.2, 29.2, 30.2, 31.2, 32.2, 33.2, 34.2, 35.2, 36.2, 37.2, 38.2, 39.2, 40.2, 41.2, 42.2, 43.2, 45.2, 46.2, 47.2, 48.2, 49.2 and 50.2, wherein the amino acid positions are relative to the reference sequence corresponding to amino acid residues 12-321 of SEQ ID NO: 2, 90, 254, 370, 734, 896, 1196, 1366, 1382, 1464, 1568, 1616, 1668, 1766, 1826, 1918, or 1942, or relative to the reference sequence corresponding to SEQ ID NO: 2, 90, 254, 370, 734, 896, 1196, 1366, 1382, 1464, 1568, 1616, 1668, 1766, 1826, 1918, or 1942.

[0465] In some embodiments, the recombinant polynucleotide comprises a polynucleotide sequence encoding an engineered adenosine kinase comprising an amino acid sequence comprising at least a substitution or substitution set of an engineered adenosine kinase variant set forth in Tables 7.1, 7.2, 8.1, 9.1, 10.2, 11.2, 12.2, 13.2, 14.2, 15.2, 16.2, 17.2, 18.2, 20.2, 21.2, 22.2, 23.2, 24.2, 25.2, 26.2, 27.2, 28.2, 29.2, 30.2, 31.2, 32.2, 33.2, 34.2, 35.2, 36.2, 37.2, 38.2, 39.2, 40.2, 41.2, 42.2, 43.2, 45.2, 46.2, 47.2, 48.2, 49.2 and 50.2, wherein the amino acid positions are relative to the reference sequence corresponding to amino acid residues 12-321 of SEQ ID NO: 2, 90, 254, 370, 734, 896, 1196, 1366, 1382, 1464, 1568, 1616, 1668, 1766, 1826, 1918, or 1942, or relative to the reference sequence corresponding to SEQ ID NO: 2, 90, 254, 370, 734, 896, 1196, 1366, 1382, 1464, 1568, 1616, 1668, 1766, 1826, 1918, or 1942.

[0466] In some embodiments, the recombinant polynucleotide comprises a polynucleotide sequence encoding an engineered adenosine kinase comprising an amino acid sequence having at least 70%, 75%, 80%, 81%, 82%, 83%, 84%, 85%, 86%, 87%, 88%, 89%, 90%, 91%, 92%, 93%, 94%, 95%, 96%, 97%, 98%, 99% or more sequence identity to a reference amino acid sequence comprising a substitution or substitution set of an engineered adenosine kinase variant set forth in Tables 7.1, 7.2, 8.1, 9.1, 10.2, 11.2, 12.2, 13.2, 14.2, 15.2, 16.2, 17.2, 18.2, 20.2, 21.2, 22.2, 23.2, 24.2, 25.2, 26.2, 27.2, 28.2, 29.2, 30.2, 31.2, 32.2, 33.2, 34.2, 35.2, 36.2, 37.2, 38.2, 39.2, 40.2, 41.2, 42.2, 43.2, 45.2, 46.2, 47.2, 48.2, 49.2 and 50.2, wherein the amino acid positions are relative to the reference sequence corresponding to amino acid residues 12-321 of SEQ ID NO: 2, 90, 254, 370, 734, 896, 1196, 1366, 1382, 1464, 1568, 1616, 1668, 1766, 1826, 1918, or 1942, or relative to the reference sequence corresponding to SEQ ID NO: 2, 90, 254, 370, 734, 896, 1196, 1366, 1382, 1464, 1568, 1616, 1668, 1766, 1826, 1918, or 1942.

[0467] In some embodiments, the recombinant polynucleotide comprises a polynucleotide sequence encoding an engineered adenosine kinase comprising an amino acid sequence comprising residues 12-321 of an even-numbered SEQ ID NO. of SEQ ID NOs: 4-1142, 1194-1808 and 1818-2124, or comprising an even-numbered SEQ ID NO. of SEQ ID NOs: 4-1142, 1194-1808 and 1818-2124.

[0468] In some embodiments, the recombinant polynucleotide comprises a polynucleotide sequence encoding an engineered adenosine kinase comprising an amino acid sequence comprising residues 12-321 of SEQ ID NO: 90, 254, 370, 734, 896, 1196, 1366, 1382, 1464, 1568, 1616, 1668, 1766, 1826, 1918, or 1942, or comprising SEQ ID NO: 90, 254, 370, 734, 896, 1196, 1366, 1382, 1464, 1568, 1616, 1668, 1766, 1826, 1918, or 1942.

[0469] In some embodiments, the recombinant polynucleotide comprises a polynucleotide sequence having at least 70%, 75%, 80%, 81%, 82%, 83%, 84%, 85%, 86%, 87%, 88%, 89%, 90%, 91%, 92%, 93%, 94%, 95%, 96%, 97%, 98%, 99%, or more sequence identity to a reference polynucleotide sequence corresponding to nucleotide residues 34-963 of SEQ ID NO: 1, 89, 253, 369, 733, 895, 1195, 1365, 1381, 1463, 1567, 1615, 1667, 1765, 1825, 1917, 1941, or 2013 or to a reference polynucleotide sequence corresponding to SEQ ID NO: 1, 89, 253, 369, 733, 895, 1195, 1365, 1381, 1463, 1567, 1615, 1667, 1765, 1825, 1917, 1941, or 2013, wherein the recombinant polynucleotide encodes an adenosine kinase.

[0470] In some embodiments, the recombinant polynucleotide comprises a polynucleotide sequence having at least 70%, 75%, 80%, 81%, 82%, 83%, 84%, 85%, 86%, 87%, 88%, 89%, 90%, 91%, 92%, 93%, 94%, 95%, 96%, 97%, 98%, 99%, or more sequence identity to a reference polynucleotide sequence corresponding to nucleotide residues 34-963 of an odd-numbered SEQ ID NO. of SEQ ID NOs: 3-1141, 1193-1807, and 1817-2123, or to a reference polynucleotide sequence corresponding to an odd-numbered SEQ ID NO. of SEQ ID NOs: 3-1141, 1193-1807, and 1817-2123, wherein the recombinant polynucleotide encodes an engineered adenosine kinase.

[0471] In some embodiments, the recombinant polynucleotide comprises a polynucleotide sequence comprising nucleotide residues 34-963 of SEQ ID NO: 1, 89, 253, 369, 733, 895, 1195, 1365, 1381, 1463, 1567, 1615, 1667, 1765, 1825, 1917, 1941, or 2013, or comprising SEQ ID NO: 1, 89, 253, 369, 733, 895, 1195, 1365, 1381, 1463, 1567, 1615, 1667, 1765, 1825, 1917, 1941, or 2013.

[0472] In some embodiments, the recombinant polynucleotide comprises a polynucleotide sequence comprising nucleotide residues 34-963 of an odd-numbered SEQ ID NO. of SEQ ID NOs: 3-1141 and 1193-1807, 1193-1807, and 1817-2123, or comprising an odd-numbered SEQ ID NO. of SEQ ID NOs: 3-1141, 1193-1807, and 1817-2123.

[0473] In some embodiments, the present disclosure provides a recombinant polynucleotide capable of hybridizing under highly stringent conditions to a reference polynucleotide encoding an engineered adenosine kinase polypeptide described herein, e.g., a recombinant polynucleotide provided in Tables 7.1, 7.2, 8.1, 9.1, 10.2, 11.2, 12.2, 13.2, 14.2, 15.2, 16.2, 17.2, 18.2, 20.2, 21.2, 22.2, 23.2, 24.2, 25.2, 26.2, 27.2, 28.2, 29.2, 30.2, 31.2, 32.2, 33.2, 34.2, 35.2, 36.2, 37.2, 38.2, 39.2, 40.2, 41.2, 42.2, 43.2, 45.2, 46.2, 47.2, 48.2, 49.2 and 50.2, or a reverse complement thereof. In some embodiments, the recombinant polynucleotide hybridizes under highly stringent conditions to a reference polynucleotide corresponding to nucleotide residues 34-963 of SEQ ID NO: 1, 89, 253, 369, 733, 895, 1195, 1365, 1381, 1463, 1567, 1615, 1667, 1765, 1825, 1917, 1941, or 2013 or to a reference polynucleotide sequence corresponding to SEQ ID NO: 1, 89, 253, 369, 733, 895, 1195, 1365, 1381, 1463, 1567, 1615, 1667, 1765, 1825, 1917, 1941, or 2013 or a reverse complement thereof. In some embodiments, the recombinant polynucleotide hybridizes under highly stringent conditions to a reference polynucleotide corresponding to nucleotide residues 34-963 of an odd-numbered SEQ ID NO. of SEQ ID NOs: 3-1141, 1193-1807, and 1817-2123, or corresponding to an odd-numbered SEQ ID NO. of SEQ ID NOs: 3-1141, 1193-1807, and 1817-2123, or a reverse complement thereof.

[0474] In some embodiments, the present disclosure provides a recombinant polynucleotide capable of hybridizing under highly stringent conditions to a reverse complement of a reference polynucleotide encoding an engineered adenosine kinase polypeptide described herein, wherein the recombinant polynucleotide hybridizing under stringent conditions encodes an adenosine kinase polypeptide comprising an amino acid sequence having one or more amino acid differences as compared to SEQ ID NO: 2, 90, 254, 370, 734, 896, 1196, 1366, 1382, 1464, 1568, 1616, 1668, 1766, 1826, 1918, or 1942, at residue positions selected from any positions as set forth in Tables 7.1, 7.2, 8.1, 9.1, 10.2, 11.2, 12.2, 13.2, 14.2, 15.2, 16.2, 17.2, 18.2, 20.2, 21.2, 22.2, 23.2, 24.2, 25.2, 26.2, 27.2, 28.2, 29.2, 30.2, 31.2, 32.2, 33.2, 34.2, 35.2, 36.2, 37.2, 38.2, 39.2, 40.2, 41.2, 42.2, 43.2, 45.2, 46.2, 47.2, 48.2, 49.2 and 50.2. In some embodiments, the recombinant polynucleotide that hybridizes under highly stringent conditions to a reverse complement of a reference polynucleotide encoding an engineered adenosine kinase polypeptide described herein encodes an adenosine kinase polypeptide having one or more amino acid differences present in an engineered adenosine kinase having an amino acid sequence corresponding to residues 12-321 of an even-numbered SEQ ID NO. of SEQ ID NOs: 4-1142, 1194-1808 and 1818-2124, or an amino acid sequence corresponding to an even-numbered SEQ ID NO. of SEQ ID NOs: 4-1142, 1194-1808 and 1818-2124, wherein the amino acid differences are relative to SEQ ID NO: 2, 90, 254, 370, 734, 896, 1196, 1366, 1382, 1464, 1568, 1616, 1668, 1766, 1826, 1918, or 1942.

[0475] In some embodiments, the recombinant polynucleotide that hybridizes under highly stringent conditions comprises a polynucleotide sequence having at least 70%, 75%, 80%, 81%, 82%, 83%, 84%, 85%, 86%, 87%, 88%, 89%, 90%, 91%, 92%, 93%, 94%, 95%, 96%, 97%, 98%, 99% or more sequence identity to a reference polynucleotide sequence corresponding to nucleotide residues 34-963 of SEQ ID NO: 1, 89, 253, 369, 733, 895, 1195, 1365, 1381, 1463, 1567, 1615, 1667, 1765, 1825, 1917, 1941, or 2013 or to a reference polynucleotide sequence corresponding to SEQ ID NO: 1, 89, 253, 369, 733, 895, 1195, 1365, 1381, 1463, 1567, 1615, 1667, 1765, 1825, 1917, 1941, or 2013 or a reverse complement thereof. In some embodiments, the recombinant polynucleotide that hybridizes under highly stringent conditions comprises a polynucleotide sequence having at least 70%, 75%, 80%, 81%, 82%, 83%, 84%, 85%, 86%, 87%, 88%, 89%, 90%, 91%, 92%, 93%, 94%, 95%, 96%, 97%, 98%, 99% or more sequence identity to a reference polynucleotide sequence corresponding to nucleotide residues 34-963 of an odd-numbered SEQ ID NO. of SEQ ID NOs: 3-1141, 1193-1807, and 1817-2123, or an odd-numbered SEQ ID NO. of SEQ ID NOs: 3-1141, 1193-1807, and 1817-2123 or a reverse complement thereof.

[0476] In some additional embodiments, the polynucleotide hybridizing under highly stringent conditions comprises a polynucleotide sequence having at least 75%, 80%, 81%, 82%, 83%, 84%, 85%, 86%, 87%, 88%, 89%, 90%, 91%, 92%, 93%, 94%, 95%, 96%, 97%, 98%, 99% or more sequence identity to a reverse complement of a polynucleotide reference sequence corresponding to nucleotide residues 34-963 of SEQ ID NO: 1, 89, 253, 369, 733, 895, 1195, 1365, 1381, 1463, 1567, 1615, 1667, 1765, 1825, 1917, 1941, or 2013, or to a reference polynucleotide sequence corresponding to SEQ ID NO: 1, 89, 253, 369, 733, 895, 1195, 1365, 1381, 1463, 1567, 1615, 1667, 1765, 1825, 1917, 1941, or 2013 encodes an engineered adenosine kinase polypeptide. In some additional embodiments, the polynucleotide hybridizing under highly stringent conditions comprises a polynucleotide sequence having at least 75%, 80%, 81%, 82%, 83%, 84%, 85%, 86%, 87%, 88%, 89%, 90%, 91%, 92%, 93%, 94%, 95%, 96%, 97%, 98%, 99% or more sequence identity to a reverse complement of a polynucleotide reference sequence corresponding to nucleotide residues 34-963 of an odd-numbered SEQ ID NO. of SEQ ID NOs: 3-1141, 1193-1807, and 1817-2123, or an odd-numbered SEQ ID NO. of SEQ ID NOs: 3-1141, 1193-1807, and 1817-2123 encodes an engineered adenosine kinase polypeptide.

[0477] In some embodiments, the recombinant polynucleotide comprises a polynucleotide sequence encoding an adenosine kinase comprising an amino acid sequence comprising
[0478] (a) residues 12 to 339 of SEQ ID NO: 1817, or residues 12 to 339 of SEQ ID NO: 1819,
[0479] (b) SEQ ID NO: 2; SEQ ID NO: 1817; or SEQ ID NO: 1819.

[0480] In some embodiments, the recombinant polynucleotide comprises a polynucleotide sequence comprising
[0481] (a) nucleotide residues 34 to 1017 of SEQ ID NO: 1817, or nucleotide residues 34 to 1017 of SEQ ID NO: 1819,
[0482] (b) SEQ ID NO: 1; SEQ ID NO: 1817; or SEQ ID NO: 1819.

[0483] In some embodiments, a recombinant polynucleotide encoding any of the adenosine kinase provided herein is manipulated in a variety of ways to provide for expression of the polypeptide. In some embodiments, the recombinant polynucleotide encoding the polypeptides are provided as expression vectors where one or more control sequences is operably linked to the recombinant polynucleotide to regulate the expression of the polynucleotide and/or encoded polypeptide. The techniques for modifying polynucleotides and nucleic acid sequences utilizing recombinant DNA methods are known in the art.

[0484] In some embodiments, the control sequences include, among others, promoter sequences, Kozak sequence, leader sequences, polyadenylation sequences, pro-peptide sequences, signal peptide sequences, regulatory elements, and transcription terminators. As known in the art, suitable promoters can be selected based on the host cells used. For bacterial host cells, suitable promoters for directing transcription of the nucleic acid constructs of the present disclosure, include, but are not limited to promoters obtained from the E. coli lac operon, Streptomyces coelicolor agarase gene (dagA), Bacillus subtilis levansucrase gene (sacB), Bacillus licheniformis alpha-amylase gene (amyL), Bacillus stearothermophilus maltogenic amylase gene (amyM), Bacillus amyloliquefaciens alpha-amylase gene (amyQ), Bacillus licheniformis penicillinase gene (penP), Bacillus subtilis xylA and xylB genes, and prokaryotic beta-lactamase gene (See e.g., Villa-Kamaroff et al., Proc. Natl Acad. Sci. USA, 1978, 75:3727-3731), as well as the tac promoter (See e.g., DeBoer et al., Proc. Natl Acad. Sci. USA, 1983, 80: 21-25). Exemplary promoters for filamentous fungal host cells, include, but are not limited to promoters obtained from the genes for Aspergillus oryzae TAKA amylase, Rhizomucor miehei aspartic proteinase, Aspergillus niger neutral alpha-amylase, Aspergillus niger acid stable alpha-amylase, Aspergillus niger or Aspergillus awamori glucoamylase (glaA), Rhizomucor miehei lipase, Aspergillus oryzae alkaline protease, Aspergillus oryzae triose phosphate isomerase, Aspergillus nidulans acetamidase, and Fusarium oxysporum trypsin-like protease (See e.g., WO 96/00787), as well as the NA2-tpi promoter (a hybrid of the promoters from the genes for Aspergillus niger neutral alpha-amylase and Aspergillus oryzae triose phosphate isomerase), and mutant, truncated, and hybrid promoters thereof. Exemplary yeast cell promoters can be from the genes can be from the genes for Saccharomyces cerevisiae enolase (ENO-1), Saccharomyces cerevisiae galactokinase (GAL1), Saccharomyces cerevisiae alcohol dehydrogenase/glyceraldehyde-3-phosphate dehydrogenase (ADH2/GAP), and Saccharomyces cerevisiae 3-phosphoglycerate kinase.

[0485] In some embodiments, promoters effective in Pichia cells are used. Other useful promoters for yeast host cells are known in the art (See e.g., Romanos et al., Yeast, 1992, 8:423-488). In some embodiments, for insect host cells, suitable promoters include, among others, baculovirus promoters (e.g., P10 and polyhedron promoters), OpIE2 promoter, and Nephotettix cincticeps actin promoters.

[0486] In some embodiments, promoters effective in Pichia cells are used. In some embodiments, for insect host cells, suitable promoters include, among others, baculovirus promoters (e.g., P10 and polyhedron promoters), OpIE2 promoter, and Nephotettix cincticeps actin promoters. In some embodiments, for mammalian host cells, suitable promoters include, among others, promoters of cytomegalovirus (CMV), chicken R-actin promoter fused with the CMV enhancer, simian virus 40 (SV40), human phosphoglycerate kinase, beta actin, elongation factor-1a or glyceraldehyde-3-phosphate dehydrogenase, or Gallus β-actin.

[0487] In some embodiments, the control sequence is also a suitable transcription terminator sequence (i.e., a sequence recognized by a host cell to terminate transcription). In some embodiments, the terminator sequence is operably linked to the 3′ terminus of the nucleic acid sequence encoding the leucine decarboxylase polypeptide. Any suitable terminator which is functional in the host cell of choice finds use in the present invention. For bacterial expression, the transcription terminators can be a Rho-dependent terminators that rely on a Rho transcription factor, or a Rho-independent, or intrinsic terminators, which do not require a transcription factor. Exemplary bacterial transcription terminators are described in Peters et al., J Mol Biol., 2011, 412(5):793-813. Exemplary transcription terminators for filamentous fungal host cells can be obtained from the genes for Aspergillus oryzae TAKA amylase, Aspergillus niger glucoamylase, Aspergillus nidulans anthranilate synthase, Aspergillus niger alpha-glucosidase, and Fusarium oxysporum trypsin-like protease. Exemplary terminators for yeast host cells can be obtained from the genes for Saccharomyces cerevisiae enolase, Saccharomyces cerevisiae cytochrome C (CYC1), and Saccharomyces cerevisiae glyceraldehyde-3-phosphate dehydrogenase. Other useful terminators for yeast host cells are known in the art (See e.g., Romanos et al., supra). Exemplary terminators for mammalian cells include, but are not limited to those from cytomegalovirus (CMV), Simian virus 40 (SV40), from Homo sapiens growth hormone hGH, from bovine growth hormone BGH, and from human or rabbit beta globulin.

[0488] In some embodiments, the control sequence is also a suitable leader sequence (i.e., a non-translated region of an mRNA that is important for translation by the host cell). In some embodiments, the leader sequence is operably linked to the 5′ terminus of the nucleic acid sequence encoding the adenosine kinase polypeptide. Any suitable leader sequence that is functional in the host cell of choice find use in the present invention. Exemplary leaders for filamentous fungal host cells are obtained from the genes for Aspergillus oryzae TAKA amylase, and Aspergillus nidulans triose phosphate isomerase. Suitable leaders for yeast host cells are obtained from the genes for Saccharomyces cerevisiae enolase (ENO-1), Saccharomyces cerevisiae 3-phosphoglycerate kinase, Saccharomyces cerevisiae alpha-factor, and Saccharomyces cerevisiae alcohol dehydrogenase/glyceraldehyde-3-phosphate dehydrogenase (ADH2/GAP). Suitable leaders for mammalian host cells include but are not limited to the 5′-UTR element present in orthopoxvirus mRNA.

[0489] In some embodiments, the control sequence comprises a 3′ untranslated nucleic acid region and polyadenylation tail nucleic acid sequence, sequences operably linked to the 3′ terminus of the protein coding nucleic acid sequence which mediate binding to proteins involved in mRNA trafficking and translation and mRNA half-life. Any polyadenylation sequence and 3′ UTR which is functional in the host cell of choice may be used in the present invention. Exemplary polyadenylation sequences for filamentous fungal host cells include, but are not limited to those from the genes for Aspergillus oryzae TAKA amylase, Aspergillus niger glucoamylase, Aspergillus nidulans anthranilate synthase, Fusarium oxysporum trypsin-like protease, and Aspergillus niger alpha-glucosidase. Useful polyadenylation sequences for yeast host cells are also known in the art (See e.g., Guo and Sherman, Mol. Cell. Biol., 1995, 15:5983-5990). Useful polyadenylation and 3′ UTR sequences for mammalian host cells include, but are not limited to, the 3′-UTRs of α- and β-globin mRNAs, mouse kappa light chain, chicken ovalbumin, and SV40 that harbor several sequence elements that increase the stability and translation of mRNA.

[0490] In some embodiments, the control sequence is also a signal peptide (i.e., a coding region that codes for an amino acid sequence linked to the amino terminus of a polypeptide and directs the encoded polypeptide into the cell's secretory pathway). In some embodiments, the 5′ end of the coding sequence of the nucleic acid sequence inherently contains a signal peptide coding region naturally linked in translation reading frame with the segment of the coding region that encodes the secreted polypeptide. Alternatively, in some embodiments, the 5′ end of the coding sequence contains a signal peptide coding region that is foreign to the coding sequence. Any suitable signal peptide coding region which directs the expressed polypeptide into the secretory pathway of a host cell of choice finds use for expression of the engineered polypeptide(s). Effective signal peptide coding regions for bacterial host cells are the signal peptide coding regions include, but are not limited to those obtained from the genes for Bacillus NCIB 11837 maltogenic amylase, Bacillus stearothermophilus alpha-amylase, Bacillus licheniformis subtilisin, Bacillus licheniformis beta-lactamase, Bacillus stearothermophilus neutral proteases (nprT, nprS, nprM), and Bacillus subtilis prsA. Further signal peptides are known in the art (See e.g., Simonen and Palva, Microbiol. Rev., 1993, 57:109-137). In some embodiments, effective signal peptide coding regions for filamentous fungal host cells include, but are not limited to the signal peptide coding regions obtained from the genes for Aspergillus oryzae TAKA amylase, Aspergillus niger neutral amylase, Aspergillus niger glucoamylase, Rhizomucor miehei aspartic proteinase, Humicola insolens cellulase, and Humicola lanuginosa lipase. Useful signal peptides for yeast host cells include, but are not limited to those from the genes for Saccharomyces cerevisiae alpha-factor and Saccharomyces cerevisiae invertase. Useful signal peptides for mammalian host cells include but are not limited to, those from the genes for immunoglobulin gamma (IgG) and the signal peptide in a human secreted protein, such as human beta-galactosidase polypeptide.

[0491] In some embodiments, the control sequence is a regulatory sequence that facilitates the regulation of the expression of the recombinant polynucleotide and/or encoded polypeptide.

[0492] Examples of regulatory systems are those that cause the expression of the gene to be turned on or off in response to a chemical or physical stimulus, including the presence of a regulatory compound. In prokaryotic host cells, suitable regulatory sequences include, but are not limited to the lac, tac, and trp operator systems. In yeast host cells, suitable regulatory systems include, but are not limited to the ADH2 system or GAL1 system. In filamentous fungi, suitable regulatory sequences include, but are not limited to the TAKA alpha-amylase promoter, Aspergillus niger glucoamylase promoter, and Aspergillus oryzae glucoamylase promoter. In mammalian cells, suitable regulatory systems include, among others, zinc-inducible sheep metallothionine (MT) promoter, dexamethasone (Dex)-inducible promoter, mouse mammary tumor virus (MMTV) promoter; ecdysone insect promoter, tetracycline-inducible promoter system, RU486-inducible promoter system, and the rapamycin-inducible promoter system.

[0493] In another aspect, the present disclosure provides an expression vector comprising a recombinant polynucleotide encoding an adenosine kinase polypeptide, where the recombinant polynucleotide is operably or operatively linked to a control sequence, such as a promoter and a terminator, a replication origin, etc., depending on the type of hosts into which they are to be introduced. The recombinant expression vector may be any suitable vector (e.g., a plasmid or virus), that can be conveniently subjected to recombinant DNA procedures and bring about the expression of the adenosine kinase polynucleotide sequence. The choice of the vector typically depends on the compatibility of the vector with the host cell into which the vector is to be introduced. The vectors may be linear or closed circular plasmids.

[0494] In some embodiments, the expression vector is an autonomously replicating vector (i.e., a vector that exists as an extra-chromosomal entity, the replication of which is independent of chromosomal replication, such as a plasmid, an extra-chromosomal element, a minichromosome, or an artificial chromosome). The vector may contain any means for assuring self-replication. In some alternative embodiments, the vector may be one which, when introduced into the host cell, is integrated into the genome and replicated together with the chromosome(s) into which it has been integrated. Furthermore, a single vector or plasmid or two or more vectors or plasmids which together contain the total DNA to be introduced into the genome of the host cell, or a transposon may be used.

[0495] In some embodiment, recombinant polynucleotides may be provided on a non-replicating expression vector or plasmid. In some embodiments, the non-replicating expression vector or plasmid can be based on viral vectors defective in replication (see, e.g., Travieso et al., npj Vaccines, 2022, Vol. 7, Article 75).

[0496] In some embodiments, the expression vector contains one or more selectable markers, which permit easy selection of transformed cells. A “selectable marker” is a gene, the product of which provides for biocide or viral resistance, resistance to heavy metals, prototrophy to auxotrophs, and the like. Examples of bacterial selectable markers include, but are not limited to the dal genes from Bacillus subtilis or Bacillus licheniformis, or markers, which confer antibiotic resistance such as ampicillin, kanamycin, chloramphenicol or tetracycline resistance. Suitable markers for yeast host cells include, but are not limited to ADE2, HIS3, LEU2, LYS2, MET3, TRP1, and URA3. Selectable markers for use in filamentous fungal host cells include, but are not limited to, amdS (acetamidase; e.g., from A. nidulans or A. orzyae), argB (ornithine carbamoyltransferases), bar (phosphinothricin acetyltransferase; e.g., from S. hygroscopicus), hph (hygromycin phosphotransferase), niaD (nitrate reductase), pyrG (orotidine-5′-phosphate decarboxylase; e.g., from A. nidulans or A. orzyae), sC (sulfate adenyltransferase), and trpC (anthranilate synthase), as well as equivalents thereof. Selectable marker for mammalian cells include, among others, chloramphenicol acetyl transferase (CAT), nourseothricin N-acetyl transferase, blasticidin-S deaminase, blastcidin S acetyltransferase, Sh ble (Zeocin® resistance), aminoglycoside 3′-phosphotransferase (neomycin resistance), hph (hygromycin resistance), thymidine kinase, and puromycin N-acetyl-transferase.

[0497] In another aspect, the present disclosure provides a host cell comprising at least one recombinant polynucleotide encoding an adenosine kinase polypeptide of the present disclosure, the recombinant polynucleotide(s) being operatively linked to one or more control sequences for expression of the adenosine kinase polypeptide. In some embodiments, the host cells suitable for use in expressing the polypeptides encoded by the expression vectors is a prokaryotic cell or eukaryotic cell known in the art. In some embodiments, the host cell is a bacterial cell, including, among others, E. coli, B. subtilis, Vibrio fluvialis, Streptomyces and Salmonella typhimurium cell. Exemplary bacterial host cells also include various Escherichia coli strains (e.g., W3110 (AfhuA) and BL21). In some embodiments, the host cell is a fungal cell, such as filamentous fungal cell or yeast cell. n some embodiments, suitable fungal host cells include, among others, Pichia, Saccharomyces, Yarrowia, Kluyveromyces, Aspergillus, Trichoderma, Neurospora, Mucor, Penicillium T. Trichoderma, or Myceliophthora fungal cell. Exemplary fungal host cell includes, among others, Pichia pastoris, Yarrowia lipolytica, Kluyveromyces marxianus, Kluyveromyces lactis, Aspergillus niger, Aspergillus oryzae, Aspergillus fumigatus Trichoderma reesei. Neurospora crassa, Mucor circinelloides, Penicillium chrysogenum T. reesei, Trichoderma harzianum, Saccharomyces cerevisiae, or Myceliophthora thermophile. In some embodiments, the host cell is an insect cell. In some embodiments, a suitable insect host cell is a lepidopteran or dipteran insect cell. Exemplary insect host cell includes, among others, Sf9 cell, Sf21 cell, Schneider 2 cell, and BTI-TN-5B1-4 (High Five) cell. In some embodiments, the host cell is a mammalian cell. In some embodiments, the host cell is a human cell or rodent cell. Exemplary mammalian cells include, among others, Expi293, HeLa, U2OS, A549, HT1080, CAD, P19, NIH 3T3, L929, Hek 293, 293F, 293E, 293T, COS, Vero, NS0, Sp2/0 cell, DUKX-X11, MCF-7, Y79, SO—Rb50, Hep G2, J558L, and CHO cell.

[0498] In another aspect, the present disclosure provides a method of producing the adenosine kinase polypeptides, where the method comprises culturing a host cell comprising an expression vector capable of expressing or producing the adenosine kinase polypeptide under suitable culture conditions such that the adenosine kinase polypeptide is expressed or produced. In some embodiments, the method comprises a step of isolating the adenosine kinase from the culture medium and/or host cell, as described herein. In some further embodiments, the method further comprises purifying the expressed adenosine kinase polypeptide.

[0499] In some embodiments, the adenosine kinase polypeptide expressed in a host cell is recovered from the cells and/or the culture medium using any one or more of the well-known techniques for protein purification, including, among others, lysozyme or detergent treatment, sonication, filtration, salting-out, ultra-centrifugation, and chromatography, such as described herein.

[0500] Chromatographic techniques for isolation/purification of the adenosine kinase polypeptides include, among others, reverse phase chromatography, high-performance liquid chromatography, ion-exchange chromatography, hydrophobic-interaction chromatography, size-exclusion chromatography, gel electrophoresis, and affinity chromatography. Conditions for purifying the adenosine kinase depends, in part, on factors such as net charge, hydrophobicity, hydrophilicity, molecular weight, molecular shape, etc., and will be apparent to those having skill in the art. In some embodiments, affinity techniques may be used to isolate the adenosine kinase. For affinity chromatography purification, an antibody that specifically binds adenosine kinase polypeptide may be used. In some embodiments, an affinity tag, e.g., His-tag, can be introduced into the adenosine kinase polypeptide for purposes of isolation/purification.

[0501] Appropriate culture media and growth conditions for the above-described host cells are well known in the art. Polynucleotides for expression of the adenosine kinases may be introduced into cells by various methods known in the art. Techniques include, among others, electroporation, biolistic particle bombardment, liposome mediated transfection, calcium chloride transfection, and protoplast fusion.

[0502] In some embodiments, the polynucleotides encoding the adenosine kinase polypeptide can be prepared by standard solid-phase methods, according to known synthetic methods. In some embodiments, polynucleotide fragments can be individually synthesized, then joined (e.g., by enzymatic or chemical litigation methods, or polymerase mediated methods) to form any desired continuous sequence. For example, polynucleotides and oligonucleotides disclosed herein can be prepared by chemical synthesis using the classical phosphoramidite method (See e.g., Beaucage et al., Tetra. Lett., 1981, 22:1859-69; and Matthes et al., EMBO J., 1984, 3:801-05), as it is typically practiced in automated synthetic methods.

[0503] In some embodiments, a method for preparing the adenosine kinase can comprise: (a) synthesizing a polynucleotide encoding a polypeptide comprising an amino acid sequence selected from the amino acid sequence of an adenosine kinase, such as described in the Tables of the Examples, and (b) expressing the engineered adenosine kinase encoded by the polynucleotide. In some embodiments of the method, the amino acid sequence encoded by the polynucleotide can optionally have one or several (e.g., up to 3, 4, 5, or up to 10) amino acid residue deletions, insertions and/or substitutions. In some embodiments, the amino acid sequence has optionally 1-2, 1-3, 1-4, 1-5, 1-6, 1-7, 1-8, 1-9, 1-10, 1-15, 1-20, 1-21, 1-22, 1-23, 1-24, 1-25, 1-30, 1-35, 1-40, 1-45, or 1-50 amino acid residue deletions, insertions and/or substitutions. In some embodiments, the amino acid sequence has optionally 1, 2, 3, 4, 5, 6, 7, 8, 9, 10, 11, 12, 13, 14, 15, 16, 17, 18, 19, 20, 21, 22, 23, 24, 25, 30, 30, 35, 40, 45, or 50 amino acid residue deletions, insertions and/or substitutions. In some embodiments, the amino acid sequence has optionally 1, 2, 3, 4, 5, 6, 7, 8, 9, 10, 11, 12, 13, 14, 15, 16, 18, 20, 21, 22, 23, 24, or 25 amino acid residue deletions, insertions and/or substitutions. In some embodiments, the substitutions can be conservative or non-conservative substitutions. The expressed polypeptide can be assessed for the desired property, e.g., adenosine kinase activity on one or more nucleosides.

### Compositions

[0504] In a further aspect, the present disclosure provides compositions of the engineered adenosine kinases disclosed herein. In some embodiments, the engineered adenosine kinase polypeptide in the composition is isolated or purified. In some embodiments, the adenosine kinase is combined with other components and compounds to provide compositions and formulations comprising the engineered adenosine kinase polypeptide as appropriate for different applications and uses.

[0505] In some embodiments, the composition comprises at least one adenosine kinase described herein. For example, a composition comprises at least one engineered adenosine kinase exemplified in Tables 7.1, 7.2, 8.1, 9.1, 10.2, 11.2, 12.2, 13.2, 14.2, 15.2, 16.2, 17.2, 18.2, 20.2, 21.2, 22.2, 23.2, 24.2, 25.2, 26.2, 27.2, 28.2, 29.2, 30.2, 31.2, 32.2, 33.2, 34.2, 35.2, 36.2, 37.2, 38.2, 39.2, 40.2, 41.2, 42.2, 43.2, 45.2, 46.2, 47.2, 48.2, 49.2 and 50.2, and the Sequence Listing. In some embodiments, the composition comprising an engineered adenosine kinase is an aqueous solution. In some embodiments, the composition comprising an engineered adenosine kinase is a lyophilizate.

[0506] In some embodiments, the composition further comprises at least a buffer. Exemplary buffers are provided in the Examples.

[0507] In some embodiments, the compositions comprises further comprises an additional enzyme, including, among others, an adenylate kinase, acetate kinase, or 3′-O-kinase, or combinations thereof.

[0508] In some embodiments, the composition further comprises a nucleoside substrate. In some embodiments, the nucleoside substrate is an unmodified nucleoside, e.g., adenosine, guanosine, cytidine, thymidine, or uridine. In some embodiments, the concentration of nucleoside in the composition is greater than that found in cells, e.g., bacterial cells or mammalian cells. In some embodiments, the nucleoside substrate concentration is about 0.1 mM to 200 mM, 0.5 mM to 180 mM, 1 mM to 150 mM, 2 mM to 120 mM, 5 mM to 100 mM, 10 mM to 80 mM, or 20 mM to 60 mM, as further described herein. In some embodiments, the NDP substrate concentration is about 100 mM-200 mM. In some embodiments, the nucleoside substrate concentration is about 0.1 mM, 0.5 mM, 1 mM, 2 mM, 5 mM, 10 mM, 20 mM, 60 mM, 80 mM, 100 mM, 120 mM, 150 mM, 180 mM, or 200 mM.

[0509] In some embodiments, the concentration of adenosine in the composition is at least 2 mM, 3 mM, 4 mM, 5 mM, 7 mM, or 10 mM, or greater. In some embodiments, the concentration of adenosine in the composition is about 0.1 mM to 200 mM, 0.5 mM to 180 mM, 1 mM to 150 mM, 2 mM to 120 mM, 5 mM to 100 mM, 10 mM to 80 mM, or 20 mM to 60 mM. In some embodiments, the ADP substrate concentration is about 100 mM-200 mM. In some embodiments, the concentration of ADP in the composition is at least 0.1 mM, 0.5 mM, 1 mM, 2 mM, 3 mM, 4 mM, 5 mM, 7 mM, 10 mM, 20 mM, 60 mM, 80 mM, 100 mM, 120 mM, 150 mM, 180 mM, or 200 mM, or greater.

[0510] In some embodiments, the concentration of cytosine in the composition is at least 0.5 mM, 1 mM, 2 mM, 3 mM, 4 mM, 5 mM, 7 mM, or 10 mM, or greater. In some embodiments, the concentration of cytosine in the composition is about 0.1 mM to 200 mM, 0.5 mM to 180 mM, 1 mM to 150 mM, 2 mM to 120 mM, 5 mM to 100 mM, 10 mM to 80 mM, or 20 mM to 60 mM. In some embodiments, the ADP substrate concentration is about 100 mM-200 mM. In some embodiments, the concentration of ADP in the composition is at least 0.1 mM, 0.5 mM, 1 mM, 2 mM, 3 mM, 4 mM, 5 mM, 7 mM, 10 mM, 20 mM, 60 mM, 80 mM, 100 mM, 120 mM, 150 mM, 180 mM, or 200 mM, or greater.

[0511] In some embodiments, the concentration of guanosine in the composition is greater than 1 mM, 2 mM, 3 mM, 4 mM, 5 mM, 7 mM, or 10 mM, or greater. In some embodiments, the concentration of guanosine in the composition is about 0.1 mM to 200 mM, 0.5 mM to 180 mM, 1 mM to 150 mM, 2 mM to 120 mM, 5 mM to 100 mM, 10 mM to 80 mM, or 20 mM to 60 mM. In some embodiments, the ADP substrate concentration is about 100 mM-200 mM. In some embodiments, the concentration of ADP in the composition is at least 0.1 mM, 0.5 mM, 1 mM, 2 mM, 3 mM, 4 mM, 5 mM, 7 mM, 10 mM, 20 mM, 60 mM, 80 mM, 100 mM, 120 mM, 150 mM, 180 mM, or 200 mM, or greater.

[0512] In some embodiments, the concentration of uridine in the composition is at least 1 mM, 2 mM, 3 mM, 4 mM, 5 mM, 7 mM, or 10 mM or greater. In some embodiments, the concentration of uridine in the composition is about 0.1 mM to 200 mM, 0.5 mM to 180 mM, 1 mM to 150 mM, 2 mM to 120 mM, 5 mM to 100 mM, 10 mM to 80 mM, or 20 mM to 60 mM. In some embodiments, the ADP substrate concentration is about 100 mM-200 mM. In some embodiments, the concentration of ADP in the composition is at least 0.1 mM, 0.5 mM, 1 mM, 2 mM, 3 mM, 4 mM, 5 mM, 7 mM, 10 mM, 20 mM, 60 mM, 80 mM, 100 mM, 120 mM, 150 mM, 180 mM, or 200 mM, or greater.

[0513] In some embodiments, the concentration of thymidine in the composition is at least 0.1 mM, 0.5 mM, 1 mM, 2 mM, 3 mM, 4 mM, 5 mM, 7 mM, or 10 mM, or greater. In some embodiments, the concentration of thymidine in the composition is about 0.1 mM to 200 mM, 0.5 mM to 180 mM, 1 mM to 150 mM, 2 mM to 120 mM, 5 mM to 100 mM, 10 mM to 80 mM, or 20 mM to 60 mM. In some embodiments, the ADP substrate concentration is about 100 mM-200 mM. In some embodiments, the concentration of ADP in the composition is at least 0.1 mM, 0.5 mM, 1 mM, 2 mM, 3 mM, 4 mM, 5 mM, 7 mM, 10 mM, 20 mM, 60 mM, 80 mM, 100 mM, 120 mM, 150 mM, 180 mM, or 200 mM, or greater.

[0514] In some embodiments, the nucleoside substrate is a modified nucleoside, such as a modified sugar moiety and/or nucleobase. In some embodiments, the nucleoside is modified on the 2′- or 3′-position of the sugar moiety (e.g., 2′-halo, 2′-O—CH₃). In some embodiments, the modified nucleoside comprises a 2′-fluoro modified nucleoside. In some embodiments, the 2′-F modified nucleoside is 2′-F-2′-deoxyadenosine, 2′-F-2′-deoxycytidine, 2′-F-2′-deoxyguanosine, 2′-F-2′-deoxyuridine, and/or 2′-F-2′-deoxythymidine. In some embodiments, the modified nucleoside comprises a 2′-O—CH₃ modified nucleoside. In some embodiments, the 2′-O—CH₃ modified nucleoside is 2′-O—CH₃ adenosine, 2′-O—CH₃ cytidine, 2′-O—CH₃ guanosine, and/or 2′-O—CH₃ uridine.

[0515] In some embodiments, the modified nucleoside concentration is about 0.1 mM to 200 mM, 0.5 mM to 180 mM, 1 mM to 150 mM, 2 mM to 120 mM, 5 mM to 100 mM, 10 mM to 80 mM, or 20 mM to 60 mM, as further described herein. In some embodiments, the modified nucleoside concentration is about 100 mM-200 mM. In some embodiments, the modified nucleoside concentration is about 0.1 mM, 0.5 mM, 1 mM, 2 mM, 5 mM, 10 mM, 20 mM, 60 mM, 80 mM, 100 mM, 120 mM, 150 mM, 180 mM, or 200 mM.

[0516] In some embodiments, the modified nucleoside is modified at the 3′-position of the sugar moiety. In some embodiments, the 3′-position of the sugar moiety is modified with a blocking group, preferably a reversible blocking group. In some embodiments, the blocking group is a formate, benzoylformate, acetate, propionate, isobutyrate, aminoxy (—ONH₂), O-methyl, O-methoxymethyl, O-methylthiomethyl, O-benzyloxymethyl, O-allyl, O-(2-nitrobenzyl), O-azidomethyl (O—CH₂N₃), O-tert-butyldithiomethyl, phosphate, diphosphate, or triphosphate. Reversible 3′-blocked nucleoside/nucleotides are described in Chen et al., Genomics, Proteomics & Bioinformatics, 2013, 11(1):34-40, Metzker et al., Nucleic Acids Res., 1994, 22 (20): 4259-4267; Sabat et al., Front Chem. 2023; 11: 1161462; and patent publications U.S. Pat. Nos. 5,763,594, 9,650,406, US20200216891; WO2004/018497; and WO 2014/139596; all of which are incorporated by reference) In some embodiments, the modified sugar moiety is a 3′-O-phosphate.

[0517] In some embodiments, the modified nucleoside comprises modified 2′- and 3′-positions of the sugar moiety, such as described herein. Exemplary modified NDP substrates with modified 2′- and 3′-positions include, among others, 2′-fluoro or 2′-O-methyl, and 3′-O-allyl, 3′-O-(2-nitrobenzyl), 3′-O-azidomethyl (0-CH₂N3), 3′-O-tert-butyldithiomethyl, or 3′-phosphate.

[0518] In some embodiments, the modified sugar moiety of the nucleoside in the compositions comprises a “locked” nucleoside. In some embodiments, the locked NDP is a locked adenosine, locked guanosine, locked cytidine, locked thymidine, or locked uridine.

[0519] In some embodiments, the modified nucleoside comprises a modified nucleobase. In some embodiments, the modified nucleobases is 5-bromo-uracil, 5-iodo-uracil, 6-mCEPh-purine, 6-phenylpyrrolocytidine, N2-alkyl 8-oxoguanosine, difluorotoluene, difluorobenzene, dichlorobenzene, imidazole, or benzimidazole. Other nucleobases are described herein.

[0520] In some embodiments, the composition further comprises a phosphate donor for the adenosine kinase, for example, NTP. In some embodiments, the phosphate donor NTP (also referred to as phosphate donor NTP) has the same nucleoside structure as the nucleoside substrate. By way of example and not limitation, if the nucleoside substrate is modified at the 2′-position of the sugar moiety, the donor NTP has the same modified 2′-position of the sugar moiety. Additionally, the phosphate donor NTP has the same nucleobase as the NMP substrate.

[0521] In some embodiments, the composition comprises an engineered adenosine kinase and one or more components of a NTP regenerating system. In some embodiments, the components of the NTP regeneration system includes, among others, pyruvate kinase, creatine kinase, adenosine kinase, and/or polyphosphate kinase. In some embodiments, the components of the NTP regeneration system includes a substrate (i.e., phosphate donor) for the enzyme in the NTP regenerating system, for example, phosphoenolpyruvate, creatine phosphate, and polyphosphate, respectively.

[0522] In some embodiments, where the NTP regenerating system uses an acetate kinase, the NTP regenerating system further comprises a pyruvate oxidase, pyruvate, and phosphate, for converting the acetate to acetyl phosphate.

[0523] In some embodiments, the composition comprises an immobilized engineered adenosine kinase, as described herein. In some embodiments, the immobilized adenosine kinase is immobilized with other enzymes, e.g., an adenylate kinase, acetate kinase, and/or 3′-O-kinase.

### Uses and Methods

[0524] In another aspect, the present disclosure provides uses of the engineered adenosine kinase enzymes, either alone or in combination with other enzymes. In some embodiments, the engineered adenosine kinase is used in the production of nucleoside monophosphate (NMP) from a nucleoside.

[0525] In some embodiments, a method of converting a nucleoside to nucleoside monophosphate comprises contacting a nucleoside with an engineered adenosine kinase described herein in the presence of a suitable phosphate donor NTP under suitable reaction conditions to convert the nucleoside to the corresponding product nucleoside monophosphate.

[0526] In some embodiments, the nucleoside substrate is a naturally occurring or unmodified nucleoside. In some embodiments, the nucleoside substrate is a nucleoside found on mRNA or DNA.

[0527] In some embodiments, the nucleoside has at the 2′-position of the sugar moiety a H or OH.

[0528] In some embodiments, the nucleoside comprises a nucleobase selected from adenine, cytosine, guanine, thymine, uracil, xanthine, hypoxanthine, 2,6-diaminopurine, purine, 6,8-diaminopurine, 5-methylcytosine (m⁵C), 2-thiouridine, pseudouridine, dihydrouridine, inosine, and 7-methylguanosine (m⁷G). In some embodiments, the nucleoside has at the 2′-position of the sugar moiety a H or OH.

[0529] In some embodiments, the unmodified nucleoside is adenosine (A), guanosine (G), uridine (U), cytidine (C), or thymidine (T), and wherein the nucleoside has at the 2′-position of the sugar moiety an OH, thereby resulting in corresponding product rAMP, rGMP, rUMP, rCMP, or rTMP, respectively.

[0530] In some embodiments, the unmodified nucleoside is adenosine (A), guanosine (G), uridine (U), cytidine (C), or thymidine (T), and wherein the nucleoside has at the 2′-position of the sugar moiety an H, thereby by resulting in corresponding product dAMP, dGMP, dUMP, dCMP, or dTMP, respectively.

[0531] In some embodiments of the method, the nucleoside substrate is a modified nucleoside, thereby resulting in production of the corresponding modified nucleoside monophosphate. In some embodiments, the modified nucleoside is modified in the sugar moiety or the nucleobase, or combination of modified sugar moiety and modified nucleobase.

[0532] In some embodiments of the method, the modified nucleoside comprises a modified sugar moiety. In some embodiments, the modified sugar moiety is modified at the 2′-position or 3′-position of the sugar moiety.

[0533] In some embodiments, the modified sugar moiety is a modified at the 2′-position of the sugar moiety. In some embodiments, the 2′-position of the sugar moiety is halo, 2′-O—R′, or 2′-O—COR′, where R′ is an alkyl, alkyloxyalkyl, cycloalkyl, heterocyclyl, aryl, heteroaryl, cycloalkylalkyl, heterocyclylalkyl, arylalkyl, or heteroarylalkyl. In some embodiments, R′ is a C₁-C₄alkyl. In some embodiments, the modified 2′-position is a 2′—O—R′, wherein in R′ is alkyloxyalkyl, alkylamine, cyanoalkyl, or —C(O)-alkyl. In some embodiments, the 2′-position of the sugar moiety of the nucleoside substrate is —O—R′, wherein R′ is —CH₃ or —CH₂CH₃ or —CH₂CH₂OCH₃. In some embodiments, the modified 2′-position is 2′-O-(2-methoxyethyl), 2′-O-allyl, 2′-O-propargyl, 2′-O-ethylamine, 2′-O-cyanoethyl, or 2′-O-acetalester.

[0534] In some embodiments of the method, the modified 2′-position is 2′-halo. In some embodiments, the modified 2′-position is F (i.e., 2′-F) or Br (i.e., 2′-Br).

[0535] In some embodiments, the modified nucleoside substrate is a locked nucleoside. In some embodiments, the locked nucleoside is a locked adenosine, locked guanosine, locked cytidine, locked thymidine, or locked uridine. In some embodiments, the ribose moiety of the locked nucleoside is in the C3′-endo (beta-D-LNA) or C2′-endo (alpha-L-LNA) conformation. In some embodiments, the locked nucleoside has a methylene bridge. In some embodiments, the locked nucleoside has an ethylene bridge. Various locked nucleotides are described in, for example, WO 99/014226, WO 00/66604, WO 98/039352, WO 2004/046160, WO 00/047599, WO 2007/134181, WO 2010/077578, WO 2010/036698, WO 2007/090071, WO 2009/006478, WO 2011/156202, WO 2008/154401, WO 2009/067647, WO 2008/150729, Morita et al., Bioorganic & Med. Chem. Lett. 2002, 12, 73-76, Seth et al. J. Org. Chem. 2010, Vol 75(5) pp. 1569-81, and Mitsuoka et al., Nucleic Acids Research 2009, 37(4), 1225-1238, and Wan and Seth, J. Medical Chemistry 2016, 59, 9645-9667.

[0536] In some embodiments of the method, the modified sugar moiety on the nucleoside substrate is modified at the 3′-position of the sugar moiety. In some embodiments, the 3′-position of the sugar moiety is modified with a blocking group, preferably a reversible blocking group. In some embodiments, the blocking group is a formate, benzoylformate, acetate, propionate, isobutyrate, aminoxy (—ONH₂), O-methyl, O-methoxymethyl, O-methylthiomethyl, O-benzyloxymethyl, O-allyl, O-(2-nitrobenzyl), O-azidomethyl (O—CH₂N₃), O-tert-butyldithiomethyl, phosphate, diphosphate, or triphosphate. Reversible 3′-blocked nucleoside/nucleotides are described in Chen et al., Genomics, Proteomics & Bioinformatics, 2013, 11(1):34-40, Metzker et al., Nucleic Acids Res., 1994, 22 (20): 4259-4267; Sabat et al., Front Chem. 2023; 11: 1161462; and patent publications U.S. Pat. Nos. 5,763,594, 9,650,406, US20200216891; WO2004/018497; and WO 2014/139596; all of which are incorporated by reference) In some embodiments, the modified sugar moiety is a 3′-O-phosphate.

[0537] In some embodiments of the method, the modified nucleoside comprises a modified nucleobase. In some embodiments, the modified nucleobase is 5-bromo-uracil, 5-iodo-uracil, 6-mCEPh-purine, 6-phenylpyrrolocytidine, N2-alkyl 8-oxoguanosine, difluorotoluene, difluorobenzene, dichlorobenzene, imidazole, or benzimidazole.

[0538] In some embodiments, the nucleobase of the nucleoside substrate is, among others, 5-methylcytosine, pyridin-4-one, pyridin-2-one, phenyl, pseudouracil, 3-methyl uracil, dihydrouridine, naphthyl, aminophenyl, 5-alkylcytidines, 5-alkyluridines, 5-halouridines, 6-azapyrimidines, 6-alkylpyrimidines, 5-propynyl-uracil, 2-thio-5-propynyl-uracil, quesosine, 2-thiouridine, 4-thiouridine, 4-acetyltidine, 5-(carboxyhydroxymethyl)uridine, 5-carboxymethylaminomethyl-2-thiouridine, 5-carboxymethylaminomethyluridine, -D-galactosylqueosine, 1-methyladenosine, 1-methylinosine, 2,2-dimethylguanosine, 3-methylcytidine, 2-methyladenosine, 2-methylguanosine, N6-methyladenosine, 7-methylguanosine, 5-methoxyaminomethyl-2-thiouridine, 5-methylaminomethy luridine, 5-methylcarbon ylmethyluridine, 5-methyloxyuridine, 5-methyl-2-thiouridine, 2-methylthio-N6-isopentenyladenosine, -D-mannosylqueosine, uridine-5-oxyacetic acid, 2-thiocytidine, N1-methyl-adenine, N6-methyl-adenine, 8′-azido-adenine, N,N-dimethy 1-adenosine, aminoallyl-adenosine, 5′-methyl-urdine, pseudouridine, N1-methyl-pseudouridine, 5′-hydroxy-methyl-uridine, 2′-thio-uridine, 4′-thio-uridine, hypoxanthine, xanthine, 5′-methyl-cytidine, 5′-hydroxy-methyl-cytidine, 6′-thio-guanine, or N7-methyl-guanine.

[0539] In some embodiments of the method, the phosphate donor is a nucleotide triphosphate (NTP), also referred to herein as phosphate donor NTP. In some embodiments, the phosphate donor NTP is rATP or dATP. In some embodiments, the phosphate donor NTP has the same nucleoside structure as the nucleoside substrate. By way of example and not limitation, if the nucleoside substrate is unmodified, the phosphate donor NTP has an unmodified nucleoside, e.g., unmodified in the sugar moiety and nucleobase. If the nucleoside substrate is modified at the 2′-position of the sugar moiety, the phosphate donor NTP has the same modification in the sugar moiety.

[0540] In some embodiments of the method, the phosphate donor is a nucleotide-5′-gamma-thiotriphosphate (NTPγS), thereby resulting in product NMPαS. In some embodiments, the phosphate donor NTP is rATPγS or dATPγS. In some embodiments, the phosphate donor NTPγS has the same nucleoside structure as the nucleoside substrate.

[0541] In some embodiments, the phosphate donor NTP is present at a concentration of about 0.001 mM to 1 mM, 0.005 mM to 0.5 mM, 0.01 mM to 0.4 mM, 0.05 mM to 0.3 mM, or 0.1 mM to 0.2 mM. In some embodiments, the phosphate donor NTP is present at a concentration of about 0.001 mM, 0.005 mM, 0.01 mM, 0.05 mM, 0.1 mM, 0.2 mM, 0.5 mM, or 1 mM.

[0542] In some embodiments, the method further comprises a NTP regenerating or recycling system for regenerating NTP from the NDP produced by the adenosine kinase reaction. In some embodiments of the method, the NTP regenerating system comprises a creatine kinase, a pyruvate kinase, a polyphosphate kinase, and/or an acetate-kinase. In the description of enzymes herein, the database accession numbers (e.g., UniProt, Genbank, NCBI, etc.) disclosing the amino acid sequence are provided in parentheses.

[0543] In some embodiments, the NTP regenerating system is pyruvate kinase and substrate phosphoenolpyruvate. Various suitable pyruvate kinases are known in the art. In some embodiments, the pyruvate kinase for use in the NTP regenerating system is the pyruvate kinase of, among others, Escherichia coli str. K-12 substr. MG1655 (AOA3L1NNV5), Geobacillus stearothermophilus ATCC 7953 (Q02499), Schizosaccharomyces pombe (Q10208), Saccharomyces cerevisiae S288C (D6VPH8), Gallus gallus liver (F1NW43), Solanum tuberosum (P22200), Oryctolagus cuniculus M1/2 (O18919), Mus musculus muscle (P52480), Rattus norvegicus M1/2 (AOA8L2Q7B9), or Homo sapien muscle (A0A804F729).

[0544] In some embodiments, the NTP regenerating system is creatine kinase and substrate creatine phosphate. Various suitable creatine kinases are known in the art. In some embodiments, the creatine kinase for use in the NTP regenerating system is the creatine kinase of, among others, Danio rerio (A8E5L0), Gallus gallus mitochondrial (P11009), Mus musculus (P07310), Bos taurus (Q5E9Y4), Oryctolagus cuniculus (P00563), or Homo sapien M-type (P06732).

[0545] In some embodiments, the NTP regenerating system is polyphosphate kinase and substrate polyphosphate. Various suitable polyphosphate kinases are known in the art. In a preferred embodiment, the polyphosphate kinase is PPK1. In some embodiments, the PPK1 for use in the NTP regenerating system is the PPK1 of, among others, Pseudomonas putida DOT-TIE (AF050238.1), Escherichia coli K-12 POA7B1 (AAC75554.1), Clostridium acetobutylicum ATCC 824 (NP_347259.1), Thermosynechococcus elongatus (WP_011056068), Acidithiobacillus ferrooxidans (WP_064219446), Acidithiobacillus thiooxidans (WP_031572361), Bacillus acidicola (WP_066264350), Acetobacter aceti (GAN58028), Acetobacter aceti (WP_077811826.1), Thioalkalivibrio denitrificans (WP_077277945.1), or Psychromonas ingrahamii (WP_041766473.1).

[0546] In some embodiments, the NTP regenerating system is an acetate kinase and its substrate acetyl phosphate. Various suitable acetates kinases are known in the art and also describe herein. In some embodiments, the acetate kinase for use in the NTP regeneration system is an acetate kinase of Escherichia coli str. K-12 substr. MG1655 (NP_416799.1), Corynebacterium jeikeium K411 (WP_011272972.1), Lactococcus cremoris subsp. cremoris KW2 (WP_011835968.1), Lactococcus lactis (WP_004254593.1), Marinitoga sp. 38H-ov (WP_165147355.1), Thermotoga sp. KOL6 (WP_101510533.1), Thermosipho melaniensis (WP_012057479.1), Thermotoga sp. RQ7 (WP_041844042.1), or Thermosipho africanus (WP_004102380.1).

[0547] In some embodiments, where the NTP regenerating system is an acetate kinase, the method of further comprises a pyruvate oxidase and substrate pyruvate and inorganic phosphate. The pyruvate oxidase converts acetate to acetyl phosphate, which is then used as a phosphate donor by the acetate kinase in the NTP regenerating system. Various pyruvate oxidases are known in the art. In some embodiments, the pyruvate oxidases are homologs of pyruvate oxidases. In some embodiments, the pyruvate oxidase is a pyruvate oxidase of Bifidobacterium mongoliense (A0A087C4V4), Alkalibacterium subtropicum (AOA1I1KLE2), Pisciglobus halotolerans (AOA1I3CCM7), Jeotgalibaca sp PTS2502 (AOA1U7E9W7), Vagococcus fluvialis (AOA8I2AXT4), Candidatus Gracilibacteria bacterium (AOA2M7FGE0), Bavariicoccus seileri A0A3D4S346), Bifidobacterium aquikefiri (AOA261G4D1), Aerococcus urinae (F218Y6), or Aerococcus suis (AOA1W1YA59).

[0548] In some embodiments, the method further comprises a catalase, which converts H₂O₂ produced by the pyruvate oxidase to H₂O. Various suitable catalases are known in the art. In some embodiments, the catalase can be the catalase of Archaeoglobus fulgidus, Bacillus stearothermophilus, E. coli, Mycobacterium intracellulare, Synechococcus sp PCC7942, Arabidopsis thaliana, Pisum sativum, or Saccharomyces cerevisiae (see, e.g., Zamocky, M., Progress in Biophysics and Molecular Biology, 1999, 72(1):19-66); see also WO1992017571). In some embodiments, the catalase is a catalase of Bos taurus (P00432), Aspergillus niger (A0A254TZH3), Helicobacter pylori (J0N6C6), Drosophila melanogaster (P17336) or Rattus norvegicus (P04762).

[0549] In the embodiments provided herein and illustrated in the Examples, various ranges of suitable reaction conditions that can be used in the processes, including but not limited to, substrate loading, co-substrate loading, pH, temperature, buffer, solvent system, cofactor, polypeptide loading, and reaction time. Further suitable reaction conditions for carrying out the process for biocatalytic conversion of substrate compounds to product compounds using the enzymes described herein can be supplemented in view of the guidance provided herein to the skilled artisan, including, but not limited to, contacting the enzymes and one or more substrate compounds under experimental reaction conditions of concentration, pH, temperature, and solvent conditions, and detecting the product compound. The present disclosure contemplates any suitable reaction conditions that may find use in the methods described herein.

[0550] In some embodiments, the substrate compound in the reaction mixtures can be varied, taking into consideration, for example, the desired amount of product compound, the effect of each substrate concentration on enzyme activity, stability of enzyme under reaction conditions, and the percent conversion of each substrate to product. In some embodiments, the suitable reaction conditions comprise a nucleoside substrate compound loading of about 0.1 μM to 1 μM, 1 μM to 2 μM, 2 μM to 3 μM, 3 μM to 5 μM, 5 μM to 10 μM, or 10 μM to 100 μM, or greater. In some embodiments, the suitable reaction conditions comprise a nucleoside substrate compound loading of about 0.1 mM to 200 mM, 0.5 mM to 180 mM, 1 mM to 150 mM, 2 mM to 120 mM, 5 mM to 100 mM, 10 mM to 80 mM, or 20 mM to 60 mM. In some embodiments, the suitable reactions conditions comprise a nucleoside substrate compound loading of about 0.1 mM, 0.5 mM, 1 mM, 2 mM, 5 mM, 10 mM, 20 mM, 60 mM, 80 mM, 100 mM, 120 mM, 150 mM, 180 mM, or 200 mM.

[0551] In some embodiments, the suitable reaction conditions comprise a nucleoside substrate compound loading of at least about 0.5 to about 25 g/L, 1 to about 25 g/L, 5 to about 25 g/L, about 10 to about 25 g/L, about 20 to about 25 g/L, or about 30 to about 60 g/L. In some embodiments, the suitable reaction conditions comprise a substrate compound loading of at least about 0.5 g/L, at least about 1 g/L, at least about 5 g/L, at least about 10 g/L, at least about 15 g/L, at least about 20 g/L, at least about 30 g/L, at least about 40 g/L, at least about 50 g/L, or at least about 60 g/L, or even greater.

[0552] In carrying out the processes described herein, the enzymes may be added to the reaction mixture in the form of a purified enzyme, partially purified enzyme, whole cells transformed with gene(s) encoding the enzyme, as cell extracts and/or lysates of such cells, and/or as an enzyme immobilized on a solid support or other support medium. Whole cells transformed with gene(s) encoding the enzyme(s) or cell extracts, lysates thereof, and isolated enzymes may be employed in a variety of different forms, including solid (e.g., lyophilized, spray-dried, and the like) or semisolid (e.g., a crude paste). The cell extracts or cell lysates may be partially purified by precipitation (ammonium sulfate, polyethyleneimine, heat treatment or the like, followed by a desalting procedure prior to lyophilization (e.g., ultrafiltration, dialysis, etc.). Any of the enzyme preparations (including whole cell preparations) may be stabilized by crosslinking using known crosslinking agents, such as, for example, glutaraldehyde or immobilization to a solid phase (e.g., Eupergit C, and the like).

[0553] In some embodiments, the gene(s) encoding the polypeptides can be transformed into host cell separately or together into the same host cell. For example, in some embodiments one set of host cells can be transformed with gene(s) encoding one polypeptide and another set can be transformed with gene(s) encoding another polypeptide. Both sets of transformed cells can be utilized together in the reaction mixture in the form of whole cells, or in the form of lysates or extracts derived therefrom. In other embodiments, a host cell can be transformed with gene(s) encoding multiple polypeptides. In some embodiments the polypeptides can be expressed in the form of secreted polypeptides and the culture medium containing the secreted polypeptides can be used for the synthesis reaction.

[0554] In some embodiments, the improved activity of the engineered adenosine kinase polypeptides disclosed herein provides for processes wherein higher percentage conversion can be achieved with lower concentrations of the engineered polypeptide. In some embodiments of the process, the suitable reaction conditions comprise an engineered polypeptide amount of about 0.1% w/w, 0.2% (w/w), 0.5% (w/w), 1% (w/w), 2% (w/w), 5% (w/w), 10% (w/w), 20% (w/w), 30% (w/w), 40% (w/w), 50% (w/w), 75% (w/w), 100% (w/w) or more of substrate compound loading.

[0555] In some embodiments, the engineered polypeptide is present at a molar ratio of engineered polypeptide to substrate of about 50 to 1, 25 to 1, 10 to 1, 5 to 1, 1 to 1, 1 to 5, 1 to 10, 1 to 25 or 1 to 50. In some embodiments, the engineered polypeptide is present at a molar ratio of engineered polypeptide to substrate from a range of about 50 to 1 to a range of about 1 to 50 or 1 to 100.

[0556] In some embodiments, the engineered polypeptide is present at about 0.01 g/L to about 50 g/L; about 0.01 to about 0.1 g/L; about 0.05 g/L to about 50 g/L; about 0.1 g/L to about 40 g/L; about 1 g/L to about 40 g/L; about 2 g/L to about 40 g/L; about 5 g/L to about 40 g/L; about 5 g/L to about 30 g/L; about 0.1 g/L to about 10 g/L; about 0.5 g/L to about 10 g/L; about 1 g/L to about 10 g/L; about 0.1 g/L to about 5 g/L; about 0.5 g/L to about 5 g/L; or about 0.1 g/L to about 2 g/L. In some embodiments, the adenosine kinase polypeptide is present at about 0.01 g/L, 0.05 g/L, 0.1 g/L, 0.2 g/L, 0.5 g/L, 1, 2 g/L, 5 g/L, 10 g/L, 15 g/L, 20 g/L, 25 g/L, 30 g/L, 35 g/L, 40 g/L, or 50 g/L.

[0557] In the embodiments of the process, the reaction conditions comprise a suitable pH. The desired pH or desired pH range can be maintained by use of an acid or base, an appropriate buffer, or a combination of buffering and acid or base addition. The pH of the reaction mixture can be controlled before and/or during the course of the reaction. In some embodiments, the suitable reaction conditions comprise a solution pH from about 4 to about 10, pH from about 5 to about 10, pH from about 5 to about 9, pH from about 6 to about 9, or pH from about 6 to about 8. In some embodiments, the reaction conditions comprise a solution pH of about 4, 4.5, 5, 5.5, 6, 6.5, 7, 7.5, 8, 8.5, 9, 9.5, or 10.

[0558] In some embodiments, in the course of the reaction, the pH of the reaction mixture may change. The pH of the reaction mixture may be maintained at a desired pH or within a desired pH range, for example, among others, by the addition of an acid or a base, before and/or during the course of the reaction. Alternatively, the pH may be controlled by using a buffer. Accordingly, in some embodiments, the reaction condition comprises a buffer. Suitable buffers to maintain desired pH ranges are known in the art and include, by way of example and not limitation, borate, potassium phosphate, 2-(N-morpholino)ethanesulfonic acid (MES), 3-(N-morpholino)propanesulfonic acid (MOPS), acetate, triethanolamine, and 2-amino-2-hydroxymethyl-propane-1,3-diol (Tris), and the like. In some embodiments, the buffer is present in a concentration of 1 mM-500 mM, 5 mM to 450 mM, 10 mM to 400 mM, 20 mM to 350 mM, 30 mM to 300 mM, 40 mM to 200 mM, or 50 mM to 100 mM. In some embodiments, the buffer is present in the composition at about 1 mM, 5 mM, 10 mM, 20 mM, 30 mM, 40 mM, 50 mM, 100 mM, 150 mM, 200 mM, 250 mM, 300 mM, 350 mM, 400 mM, 450 mM or 500 mM. In some embodiments, the reaction conditions comprise water as a suitable solvent with no buffer present.

[0559] In the embodiments of the processes herein, a suitable temperature is used for the reaction conditions, for example, taking into consideration the increase in reaction rate at higher temperatures, and the activity of the enzyme during the reaction time period. In some embodiments, the suitable reaction conditions comprise a temperature of about 10° C. to about 95° C., about 10° C. to about 75° C., about 15° C. to about 95° C., about 20° C. to about 95° C., about 20° C. to about 65° C., about 25° C. to about 70° C., or about 50° C. to about 70° C. In some embodiments, the suitable reaction conditions comprise a temperature of about 10° C., 15° C., 20° C., 25° C., 30° C., 35° C., 40° C., 45° C., 50° C., 55° C., 60° C., 65° C., 70° C., 75° C., 80° C., 85° C., 90° C. or 95° C. In some embodiments, the temperature during the enzymatic reaction can be maintained at a specific temperature throughout the course of the reaction. In some embodiments, the temperature during the enzymatic reaction can be adjusted over a temperature profile during the course of the reaction.

[0560] In some embodiments, the processes are carried out in a solvent. Suitable solvents include water, aqueous buffer solutions, organic solvents, polymeric solvents, and/or co-solvent systems, which generally comprise aqueous solvents, organic solvents and/or polymeric solvents. The aqueous solvent (water or aqueous co-solvent system) may be pH-buffered or unbuffered. In some embodiments, the processes using the engineered adenosine kinase polypeptides can be carried out in an aqueous co-solvent system comprising an organic solvent (e.g., ethanol, isopropanol (IPA), dimethyl sulfoxide (DMSO), dimethylformamide (DMF) ethyl acetate, butyl acetate, 1-octanol, heptane, octane, methyl t butyl ether (MTBE), toluene, and the like), ionic or polar solvents (e.g., 1-ethyl 4 methylimidazolium tetrafluoroborate, 1-butyl-3-methylimidazolium tetrafluoroborate, 1-butyl 3 methylimidazolium hexafluorophosphate, glycerol, polyethylene glycol, and the like). In some embodiments, the co-solvent can be a polar solvent, such as a polyol, dimethylsulfoxide (DMSO), or lower alcohol. The non-aqueous co-solvent component of an aqueous co-solvent system may be miscible with the aqueous component, providing a single liquid phase, or may be partly miscible or immiscible with the aqueous component, providing two liquid phases. Exemplary aqueous co-solvent systems can comprise water and one or more co-solvents selected from an organic solvent, polar solvent, and polyol solvent. In general, the co-solvent component of an aqueous co-solvent system is chosen such that it does not adversely inactivate the enzymes under the reaction conditions.

[0561] Appropriate co-solvent systems can be readily identified by measuring the enzymatic activity of the specified enzymes with a defined substrate of interest in the candidate solvent system, utilizing an enzyme activity assay, such as those described herein.

[0562] In some embodiments of the process, the suitable reaction conditions comprise an aqueous co-solvent, where the co-solvent comprises DMSO at about 1% to about 50% (v/v), about 1 to about 40% (v/v), about 2% to about 40% (v/v), about 5% to about 30% (v/v), about 10% to about 30% (v/v), or about 10% to about 20% (v/v). In some embodiments of the process, the suitable reaction conditions can comprise an aqueous co-solvent comprising ethanol at about 1% (v/v), about 5% (v/v), about 10% (v/v), about 15% (v/v), about 20% (v/v), about 25% (v/v), about 30% (v/v), about 35% (v/v), about 40% (v/v), about 45% (v/v), or about 50% (v/v).

[0563] In some embodiments, the reaction conditions comprise a surfactant for stabilizing or enhancing the reaction. Surfactants can comprise non-ionic, cationic, anionic and/or amphiphilic surfactants. Exemplary surfactants, include by way of example and not limitation, nonyl phenoxypolyethoxylethanol (NP40), TRITON™ X-100 polyethylene glycol tert-octylphenyl ether, polyoxyethylene-stearylamine, cetyltrimethylammonium bromide, sodium oleylamidosulfate, polyoxyethylene-sorbitanmonostearate, hexadecyldimethylamine, etc. Any surfactant that may stabilize or enhance the reaction may be employed. The concentration of the surfactant to be employed in the reaction may be generally from 0.1 to 50 mg/mL, particularly from 1 to 20 mg/mL.

[0564] In some embodiments, the reaction conditions include an antifoam agent, which aids in reducing or preventing formation of foam in the reaction solution, such as when the reaction solutions are mixed or sparged. Anti-foam agents include non-polar oils (e.g., minerals, silicones, etc.), polar oils (e.g., fatty acids, alkyl amines, alkyl amides, alkyl sulfates, etc.), and hydrophobic (e.g., treated silica, polypropylene, etc.), some of which also function as surfactants. Exemplary anti-foam agents include Y-30® (Dow Corning), poly-glycol copolymers, oxy/ethoxylated alcohols, and polydimethylsiloxanes. In some embodiments, the anti-foam can be present at about 0.001% (v/v) to about 5% (v/v), about 0.01% (v/v) to about 5% (v/v), about 0.1% (v/v) to about 5% (v/v), or about 0.1% (v/v) to about 2% (v/v). In some embodiments, the anti-foam agent can be present at about 0.001% (v/v), about 0.01% (v/v), about 0.1% (v/v), about 0.5% (v/v), about 1% (v/v), about 2% (v/v), about 3% (v/v), about 4% (v/v), or about 5% (v/v) or more as desirable to promote the reaction.

[0565] In some embodiments, the quantities of reactants used in the synthesis reaction will generally vary depending on the quantities of product desired, and concomitantly the amount of substrates employed. Those having ordinary skill in the art will readily understand how to vary these quantities to tailor them to the desired level of productivity and scale of production.

[0566] In some embodiments, the order of addition of reactants is not critical. The reactants may be added together at the same time to a solvent (e.g., monophasic solvent, biphasic aqueous co-solvent system, and the like), or alternatively, some of the reactants may be added separately, and some together at different time points. For example, where applicable, the cofactor, co-substrate and substrate may be added first to the solvent.

[0567] In some embodiments, the reaction components (e.g., enzyme, salts, etc.) may be provided to the reaction in a variety of different forms, including powder (e.g., lyophilized, spray dried, and the like), solution, emulsion, suspension, and the like. The reactants can be readily lyophilized or spray dried using methods and equipment that are known to those having ordinary skill in the art. For example, the protein solution can be frozen at −80° C. in small aliquots, then added to a pre-chilled lyophilization chamber, followed by the application of a vacuum.

[0568] For improved mixing efficiency when an aqueous co-solvent system is used, the polypeptide(s), and co-substrate may be added and mixed into the aqueous phase first. The substrate may be added and mixed in, followed by the organic phase or the substrate may be dissolved in the organic phase and mixed in. Alternatively, the substrate may be premixed in the organic phase, prior to addition to the aqueous phase.

[0569] The processes of the present invention are generally allowed to proceed until further conversion of substrate to product does not change significantly with reaction time (e.g., less than 10% of substrate being converted, or less than 5% of substrate being converted). In some embodiments, the reaction is allowed to proceed until there is complete or near complete conversion of substrate to product. Transformation of substrate to product can be monitored using known methods by detecting substrate and/or product, with or without derivatization. Suitable analytical methods include gas chromatography, HPLC, MS, and the like. In some embodiments, after suitable conversion to product, the reactants are separated from the product and additional reactants are added.

[0570] Any of the processes disclosed herein using the polypeptides for the preparation of products can be carried out under a range of suitable reaction conditions, including but not limited to ranges of substrates, temperature, pH, solvent system, substrate loading, polypeptide loading, cofactor loading, and reaction time. In one example, the suitable reaction conditions for the conversion of a nucleoside to a NMP comprise: (a) substrate loading of about 1-200 mM nucleoside; (b) about 0.01 g/L to 5 g/L engineered adenosine kinase polypeptide; (c) 1-100 mM MgCl₂; (e) 5 to 100 mM of buffer, e.g., Tris-HCl; (f) 0.01-100 mM NTP (e.g., ATP); (g) pH at 5-9; and (h) temperature of about 15° C. to 70° C.

[0571] In some embodiments, additional reaction components or additional techniques carried out to supplement the reaction conditions. These can include taking measures to stabilize or prevent inactivation of the enzyme, reduce product inhibition, shift reaction equilibrium to formation of the desired product.

[0572] As described herein, the methods of using the polypeptides described herein can be carried out using the enzymes bound or immobilized on a solid support. Methods of polypeptide immobilization are known in the art. In some embodiments, the engineered polypeptides can be bound non-covalently or covalently. Various methods for conjugation and immobilization of enzymes to solid supports (e.g., resins, membranes, beads, glass, etc.) are described in, for example, Yi et al., Proc. Biochem., 2007, 42(5):895-898; Martin et al., Appl. Microbiol. Biotechnol., 2007, 76(4): 843-851; Koszelewski et al., J. Mol. Cat. B: Enzymatic, 2010, 63: 39-44; Truppo et al., Org. Proc. Res. Dev., published online: dx.doi.org/10.1021/op200157c; Hermanson, “Bioconjugate Techniques,” 2nd Ed., Academic Press, Cambridge, MA (2008); Mateo et al., Biotechnol. Prog., 2002, 18(3):629-34; and “Bioconjugation Protocols: Strategies and Methods,” In “Methods in Molecular Biology,” Niemeyer (ed.), Humana Press, New York, NY (2004); the disclosures of each which are incorporated by reference herein). Solid supports useful for immobilizing the engineered polypeptides of the present disclosure include, but are not limited to, beads or resins comprising polymethacrylate with epoxide functional groups, polymethacrylate with amino epoxide functional groups, styrene/DVB copolymer or polymethacrylate with octadecyl functional groups. In some embodiments, exemplary solid supports useful for immobilizing the engineered polypeptides of the present invention include, but are not limited to, EnginZyme (including, EziG-1, EziG-1, and EziG-3), chitosan beads, Eupergit C, and SEPABEADs (Mitsubishi) (including EC-EP, EC-HFA/S, EXA252, EXE119 and EXE120).

[0573] In further embodiments, any of the above described processes for the conversion of one or more substrate compounds to product compound can further comprise one or more steps selected from: extraction; isolation; purification; and crystallization of product compound. Methods, techniques, and protocols for extracting, isolating, purifying, and/or crystallizing the product from biocatalytic reaction mixtures produced by the above disclosed processes are known to the ordinary artisan. Additionally, illustrative methods are provided in the Examples below.

### EXAMPLES

[0574] The following Examples, including experiments and results achieved, are provided for illustrative purposes only and are not to be construed as limiting the present invention.

[0575] In the experimental disclosure below, the following abbreviations apply where applicable: ppm (parts per million); M (molar); mM (millimolar), uM and μM (micromolar); nM (nanomolar); mol (moles); gm and g (gram); mg (milligrams); ug and μg (micrograms); L and 1 (liter); ml and mL (milliliter); ul, μl, uL and μL (microliter); cm (centimeters); mm (millimeters); um and μm (micrometers); sec. (seconds); min(s) (minute(s)); h(s) and hr(s) (hour(s)); U (units); MW (molecular weight); D (daltons); rpm (rotations per minute); ° C. (degrees Celsius); LB (Luria Broth); IPTG (isopropyl-β-D-thiogalactoside); LiK (lithium-potassium); DNA (deoxyribonucleic acid); and RNA (ribonucleic acid).

### Nucleotide Modifications and Oligonucleotides

Description of modifications in oligonucleotide sequences

| Alias(es) | Description |
|---|---|
| A, dA | 2′-deoxyadenosine |
| C, dC | 2′-deoxycytidine |
| G, dG | 2′-deoxyguanosine |
| T, dT | 2′-deoxythymidine |
| rA | adenosine ribonucleotide |
| rC | cytidine ribonucleotide |
| rG | guanosine ribonucleotide |
| rU | uridine ribonucleotide |
| mA | 2′-methoxyadenosine |
| mC | 2′-methoxycytidine |
| mG | 2′-methoxyguanosine |
| mU | 2′-methoxyuridine |
| N{number}, e.g. T15 | Poly(N) of length {number} |
| * | phosphorothioate linkage |
| FAM-, /56-FAM/ | 5′-6-carboxyfluorescein |
| 5′P, /5Phos/ | 5′-phosphorate |
| 3′P, /3Phos/ | 3′-phosphorate |
| fA, /52FA/, /i2FA/, /32FA/ | 2′-fluoroadenosine |
| fG, /52FG/, /i2FG/, /32FG/ | 2′-fluoroguanosine |
| fU, /52FU/, /i2FU/, /32FU/ | 2′-fluorouridine |
| fC, /52FC/, /i2FC/, /32FC/ | 2′-fluorocytidine |

Oligonucleotide sequences are represented as DNA sequences. In this context, A, G, C and T refer to 2′-deoxyribonucleotides. In other contexts, A, G, C, and T can refer to nucleotides with modifications at the 2′ position.

| | SEQ | |
|---|---|---|
| | ID | |
| Alias | NO: | Oligo sequence |
| T15mGmAmC | 1163 | TTTTTTTTTTTTTTTmGmAmC |
| FAM-T15mGmAmC | 1164 | /56-FAM/TTTTTTTTTTTTTTTmGmAmC |
| T15mGmAmCrG | 1165 | TTTTTTTTTTTTTTTmGmAmCrG |
| FAM-T15mGmAmCrG | 1166 | /56-FAM/TTTTTTTTTTTTTTTmGmAmCrG |
| T15mGmAmC/32FA/ | 1167 | TTTTTTTTTTTTTTTmGmAmC/32FA/ |
| FAM-T15mGmAmC/32FA/ | 1168 | /56-FAM/TTTTTTTTTTTTTTTmGmAmC/32FA/ |
| T15mGmAmC/32FG/ | 1169 | TTTTTTTTTTTTTTTmGmAmC/32FG/ |
| FAM-T15mGmAmC/32FG/ | 1170 | /56-FAM/TTTTTTTTTTTTTTTmGmAmC/32FG/ |
| T15mGmAmCmA | 1171 | TTTTTTTTTTTTTTTmGmAmCmA |
| FAM-T15mGmAmCmA | 1172 | /56-FAM/TTTTTTTTTTTTTTTmGmAmCmA |
| T15mGmAmC/52FG/ | 1809 | TTTTTTTTTTTTTTTmGmAmC/52FG/ |
| FAM-T15mGmAmC/52FG/ | 1810 | /56-FAM/TTTTTTTTTTTTTTTmGmAmC/52FG/ |
| T15mGmAmCmC | 1811 | TTTTTTTTTTTTTTTmGmAmCmC |
| FAM-T15mGmAmCmC | 1812 | /56-FAM/TTTTTTTTTTTTTTTmGmAmCmC |
| T15mGmAmCmU | 1813 | TTTTTTTTTTTTTTTmGmAmCmU |
| FAM-T15mGmAmCmU | 1814 | /56-FAM/TTTTTTTTTTTTTTTmGmAmCmU |
| T15mGmAmCmG | 1815 | TTTTTTTTTTTTTTTmGmAmCmG |
| FAM-T15mGmAmCmG | 1816 | /56-FAM/TTTTTTTTTTTTTTTmGmAmCmG |

### Example 1

### Adenosine Kinase (AdoK) Selection, Plasmid Construction, and Directed Evolution Gene Acquisition and Expression of Adenosine Kinase Variants

[0576] Synthetic genes encoding N-terminal 6-histidine tagged versions of three wild-type (WT) adenosine kinase enzymes (AdoK) were cloned into the pCK900 vector system (See e.g., U.S. Pat. No. 9,714,437, which is hereby incorporated by reference in its entirety) and subsequently expressed in an E. coli strain derived from W3110TKO.

[0577] Cells transformed with the adenosine kinase (AdoK) expression constructs were grown at shake-flask scale using IPTG induction, as described in Example 3. The cells were then lysed, purified, and dialyzed into storage buffer (20 mM Tris-HCl, pH 7.4, 100 mM KCl, 0.1 mM EDTA, and 50% glycerol). After overnight dialysis, protein samples were removed, and adenosine kinase enzyme concentrations were measured by absorption at 280 nm using a NanoDrop™ 1000 spectrophotometer. Soluble protein concentrations are summarized in Table 1.1 below.

TABLE 1.1
Soluble Enzyme Production of Adenosine Kinase Variants

| SEQ ID NO: | Source organism of adenosine kinase | FIOP Soluble Enzyme Production |
|---|---|---|
| (nt/aa) | gene sequence | (Relative to SEQ ID NO: 2) |
| 1817/1818 | Thermostaphylospora chromogena | ++ |
| 1819/1820 | Carbonactinospora thermoautotrophica | ++ |
| 1/2 | Xanthomonas campestris | + |

“Levels of increased soluble enzyme production were determined relative to the reference polypeptide of SEQ ID NO: 50 and defined as follows: ““+”” 1.00 to 1.19, “+” > 1.19

[0578] The wild-type (WT) adenosine kinase (AdoK) enzyme (SEQ ID NO: 2) is a carbohydrate kinase family protein encoded by the genome of Xanthemonas campestris (UniProt ID: A0A3E1LD95). A synthetic gene (SEQ ID NO: 1) encoding an N-terminal 6-histidine tagged version of the WT AdoK was designed with codon optimization for E. coli expression, synthesized, and subcloned into the E. coli expression vector pCK100900i (See e.g., U.S. Pat. No. 7,629,157 and US Pat. Appln. Publn. 2016/0244787) all of which are hereby incorporated by reference). This plasmid construct was transformed into an E. coli strain derived from W3110. Directed evolution techniques generally known by those skilled in the art were used to generate libraries of gene variants from these plasmids. The substitutions in the enzyme variants described herein are indicated with reference to the N-terminal 6-histidine tagged version of the WT AdoK enzyme (i.e., SEQ ID NO: 2) or variants thereof, as indicated.

### Example 2

### AdoK Expression and Lysate Processing for High Throughput (HTP) Screening

### High Throughput (HTP) Growth of AdoK Enzyme and Variants

[0579] Transformed E. coli cells were selected by plating onto LB agar plates containing 1% glucose and 30 μg/mL chloramphenicol. After overnight incubation at 37° C., colonies were placed into the wells of 96-well shallow flat bottom NUNC™ (Thermo-Scientific) plates filled with 180 μl/well LB medium supplemented with 1% glucose and 30 μg/mL chloramphenicol. The cultures were allowed to grow overnight for 18-20 hours in a shaker (200 rpm, 30° C., and 85% relative humidity; Kuhner). Overnight growth samples (20 μL) were transferred into Costar 96-well deep plates filled with 380 μL of Terrific Broth supplemented with 30 μg/mL chloramphenicol. The plates were incubated for 120 minutes in a shaker (250 rpm, 30° C., and 85% relative humidity; Kuhner) until the OD₆₀₀ reached between 0.4-0.8. The cells were then induced with 40 μL of 10 mM IPTG in sterile water and incubated overnight for 18-20 hours in a shaker (250 rpm, 30° C., and 85% relative humidity; Kuhner). The cells were pelleted (4,000 rpm for 20 min), the supernatants were discarded, and the cells were frozen at −80° C. prior to analysis.

Thermal Lysis of HTP Cell Pellets with Lysozyme (Examples 13-25)

[0580] For lysis, 400 μL lysis buffer containing 50 mM triethanolamine buffer, pH 7.5, and 0.1 g/L lysozyme were added to the cell pellet in each well. The cells were shaken vigorously at room temperature for 5 minutes on a bench top shaker. An aliquot of the re-suspended cells (5-100 uL) was transferred to a 96-well format 200 μL BioRad PCR plate, diluting to 100 μL in lysis buffer if necessary, then briefly spun-down prior to 1 h heat treatment at the temperature indicated, typically 45-60° C. Following heat-treatment, the cell debris was pelleted by centrifugation (4,000 rpm at 4° C. for 10 min), and clear supernatants were then used in biocatalytic reactions to determine their activity levels.

### Example 3

### Shake Flask Expression and Purification of AdoK

### Shake Flask Expression

[0581] Selected HTP cultures grown as described above were plated onto LB agar plates with 1% glucose and 30 μg/mL chloramphenicol and grown overnight at 37° C. A single colony from each culture was transferred to 5 mL of LB broth with 1% glucose and 30 μg/mL chloramphenicol. The cultures were grown for 20 h at 30° C., 250 rpm, and subcultured at a dilution of approximately 1:50 into 250 mL of Terrific Broth with 30 μg/mL of chloramphenicol, to a final OD₆₀₀ of about 0.05. The cultures were incubated for approximately 195 min at 30° C., 250 rpm, to an OD₆₀₀ of about 0.6, and then induced with the addition of IPTG at a final concentration of 1 mM. The induced cultures were incubated for 20 h at 30° C., 250 rpm. Following this incubation period, the cultures were centrifuged at 4,000 rpm for 10 min. The culture supernatant was discarded, and the pellets were resuspended in 35 mL of 20 mM triethanolamine, pH 7.5. This cell suspension was chilled in an ice bath and lysed using a Microfluidizer cell disruptor (Microfluidics M-110L). The crude lysate was pelleted by centrifugation (10,000 rpm for 60 min at 4° C.), and the supernatant was then filtered through a 0.2 μm PES membrane to further clarify the lysate.

Purification of AdoK from Shake Flask Lysates

[0582] AdoK lysates were supplemented with 1/50th volume of SF elution buffer (50 mM Tris-HCl, 500 mM NaCl, 250 mM imidazole, 0.02% v/v Triton X-100 reagent) per well. Lysates were then purified using an AKTA Start purification system and a 5 mL HisTrap FF column (GE Healthcare). The SF wash buffer comprised 50 mM Tris-HCl, 300 mM NaCl, 20 mM imidazole, 0.02% v/v Triton X-100 reagent.

TABLE 3.1
Purification Parameters

| Parameter | Volume |
|---|---|
| Column volume | 5 mL |
| Flow rate | 8-12 mL/min |
| Pressure limit | 0.3 MPa |
| Sample volume | 50 mL |
| Equilibration volume | 5 column volumes (CV) = 25 mL |
| Wash Unbound volume | 20 CV = 100 mLs |
| Elution | Isocratic (step) |
| Elution volume | 5 CV = 25 mLs |
| Fraction volume | 1.5 mLs |
| RE-equilibration volume | 5 CV = 25 mLs |

[0583] Elution fractions containing protein were identified by UV absorption (A280) and pooled, then dialyzed overnight in dialysis buffer (20 mM Tris-HCl, pH 7.4, 100 mM KCl, 0.1 mM EDTA, and 50% glycerol) in a 3.5K Slide-A-Lyzer™ dialysis cassette (Thermo Fisher) for buffer exchange. AdoK concentrations in the preparations were measured by absorption at 280 nm.

### Example 4

### Biosynthetic Cascade Reactions for Production of Nucleotide Triphosphates (NTPs)

### NTP Biosynthetic Reaction Setup

[0584] Reactions were performed in 384-well format 40 μL BioRad PCR plates. AdoK variants were assayed in the presence of adenylate kinase (AdyK/NMP kinase) and acetate kinase (AcK) variants to enable direct conversion of nucleosides to the corresponding triphosphate. The reactions were set up as follows: (i) all reaction components, except for the nucleoside substrate and the AdoK lysate, were premixed in a single solution and were aliquoted into each well of the 384-well plates, (ii) AdoK lysate solution was then added into the wells, and (iii) an aliquot of the substrate nucleoside in DMSO was added to initiate the reaction. The reaction plate was heat-sealed with a peelable aluminum seal and incubated in a thermocycler at the indicated temperature and reaction time, then held at 10° C. prior to analysis.

### Example 5

### High-Performance Liquid Chromatography (HPLC) Analysis of Phosphorylated Products

### Sample Preparation and Reaction Analysis Using HPLC:

[0585] The nucleoside substrates, along with their respective 5′-monopohosphate (NMP), 5′-diphosphate (NDP), and 5′-triphosphate (NTP) products produced using reactions set up as described in Example 4 were analyzed using HPLC. Mobile phases consisted of 50 mM potassium phosphate (pH 7) with 2 mM tetrabutylammonium hydrogensulfate (Solvent A), acetonitrile (solvent B), and water (Solvent C). Products were detected by UV absorption at 254 nm. In some instances, a Zorbax RR StableBond Aq, 3.0×150 mm, 3.5 μm (Agilent, #863954-314) column was used. In other instances, a Zorbax RR StableBond Aq, 3.0×100 mm, 3.5 μm (Agilent, #861954-314) column was used, while in other instances, a Zorbax RR StableBond Aq, 2.1×50 mm, 3.5 μm (Agilent, #871700-914) column was used.

### Example 6

### Analysis of NTP Production in Biosynthetic Cascade Using Capillary Electrophoresis

### Coupling of NTP Biosynthetic Reactions to TdT for CE:

[0586] For high-throughput (HTP) determination of NTP yield, NTP biosynthetic cascade reactions were terminated with either a heatkill at 95° C. for 2 minutes or by dilution with 75% methanol. Samples were then diluted into a coupling reaction. The reaction contained 20 mM triethanolamine (TEoA), 0.25 mM CoCl₂, 0.001 units of inorganic pyrphosphatase (New England Biolabs), 4 μM SEQ ID NO: 1162 (TdT enzyme variant), 12.375 μM unlabeled oligonucleotide, and 0.125 μM 5′-6-FAM-labeled oligonucleotide. Reactions were carried out at 50° C. for 60 minutes, followed by 2 minutes at 95° C.

### Sample Preparation for Reaction Analysis Using CE:

[0587] For analysis of reaction samples, capillary electrophoresis was performed using either an ABI 3500XL Genetic Analyzer (ThermoFisher) or a SeqStudio™ Flex Genetic Analyzer (ThermoFisher). Reactions (1 μL) were quenched by the additions of 19 μL of 1 mM aqueous ethylenediaminetetraacetic acid (EDTA) Quenched reactions were diluted to 1.25 nM oligonucleotide, and a 2-μL aliquot of this solutions was transferred to a new 96-well MicroAmp Optical PCR plate or a 384-well MicroAmp Optical PCR plate containing 18 μL Hi-Di™ Formamide (ThermoFisher) containing the Alexa633 size standard. The ABI 3500XL and SeqStudio™ Flex were configured with POP6 polymer, 50 cm capillaries, and a 55° C. oven temperature. Pre-run settings were 18 kV for 50 sec. Injection was 10 kV for 2 sec, and the run settings were 19 kV for 620-640 sec. FAM-labeled oligo substrates and products were identified by their sizes relative to the sizing ladder.

### Example 7

### Improvements Over SEQ ID NO: 2 in Activity on Adenosine and Thermal Stability

### HTP Screening for Improved AdoK Variants

[0588] The enzyme variants were grown and lysed as in Example 2. The enzyme variants were lysed at 45° C. for 60 minutes, and the clarified lysates were used for further HTP assays.

[0589] To assess activity, 3% v/v clarified AdoK lysate was added to a reaction mixture with a final volume of 50 μL, containing a final concentration of: 50 mM Tris-HCl, pH 8, 10 μM adenosine 5′-triphosphate (Sigma), 1 μM purified acetate kinase (SEQ ID NO: 1158), 1 μM purified adenylate kinase (SEQ ID NO: 1144), 50 mM lithium potassium acetylphosphate (Sigma Aldrich), 10 mM magnesium sulfate, 50% v/v DMSO, and 10 mM nucleoside substrate. The nucleoside substrate used in this instance was adenosine (Sigma Aldrich, #A4036). The reaction was then allowed to proceed at in a Multitron (Infors) at 30° C., 400 rpm, for 30 minutes. 10 μL of the reactions were then diluted 40-fold into 75% methanol and analyzed via HPLC as described in Example 5. Activity relative to SEQ ID NO: 2 (Activity FIOP) was calculated based on the percent product observed for variants compared to the percent product observed in the reaction with SEQ ID NO: 2 (where the percent product may be set as the average of replicates or else the highest single sample as appropriate). The results are shown in Table 7.1.

TABLE 7.1
Adenosine kinase activity relative to SEQ ID NO: 2

| SEQ ID | Amino Acid Differences | FIOP Percent |
|---|---|---|
| NO: | (Relative to | Product Relative to |
| (nt/aa) | SEQ ID NO: 2) | SEQ ID NO: 2 |
| 3/4 | F109R/P111A | +++ |
| 5/6 | I104G/P111A | +++ |
| 7/8 | P38C | ++ |
| 9/10 | I104A/P111A | ++ |
| 11/12 | I104Y/P111A | ++ |
| 13/14 | K40R | ++ |
| 15/16 | P111G | ++ |
| 17/18 | F109S/P111A | ++ |
| 19/20 | R55H/Q316S | ++ |
| 21/22 | F109G/P111A | ++ |
| 23/24 | P258V | + |
| 25/26 | D106E/P111A | + |
| 27/28 | I104N/P111A | + |
| 29/30 | F109T/P111A | + |
| 31/32 | F109P/P111A | + |
| 33/34 | K103Q/P111A | + |
| 35/36 | I104D/P111A | + |
| 37/38 | I104R/P111A | + |
| 39/40 | N121F | + |
| 41/42 | I104S/P111A | + |
| 43/44 | I104T/P111A | + |
| 45/46 | N207R | + |

Levels of increased activity were determined relative to the reference polypeptide of SEQ ID NO: 2 and defined as follows: “+” 1.02 to 1.15, “++” > 1.15, “+++” > 1.26.

[0590] To assess stability, reactions were performed with the following changes. Lysis was carried out at 52° C. for 60 minutes in a thermocycler (Eppendorf). A final concentration of 10% clarified AdoK lysate was used in the reaction mixture. Stability relative to SEQ ID NO: 2 (Stability FIOP) was calculated based on the percent product observed for variants compared to the percent product observed in the reaction with SEQ ID NO: 2 (where the percent product may be set as the average of replicates or else the highest single sample as appropriate). The results are shown in Table 7.2.

TABLE 7.2
Adenosine kinase activity relative to SEQ ID NO: 2

| SEQ ID | | FIOP Percent |
|---|---|---|
| NO: | Amino Acid Differences | Product Relative to |
| (nt/aa) | (Relative to SEQ ID NO: 2) | SEQ ID NO: 2 |
| 7/8 | P38C | +++ |
| 11/12 | I104Y/P111A | ++ |
| 13/14 | K40R | + |
| 19/20 | R55H/Q316S | + |
| 23/24 | P258V | + |
| 25/26 | D106E/P111A | +++ |
| 27/28 | I104N/P111A | ++ |
| 29/30 | F109T/P111A | +++ |
| 33/34 | K103Q/P111A | + |
| 37/38 | I104R/P111A | + |
| 41/42 | I104S/P111A | ++ |
| 43/44 | I104T/P111A | +++ |
| 47/48 | P111A | +++ |
| 49/50 | F109E/P111A | +++ |
| 51/52 | K103R/P111A | +++ |
| 53/54 | F109L/P111A | +++ |
| 55/56 | I104L/P111A | +++ |
| 57/58 | D106P/P111A | ++ |
| 59/60 | Q316E | ++ |
| 61/62 | I43R | ++ |
| 63/64 | K103L/P111A | ++ |
| 65/66 | Q316S | ++ |
| 67/68 | R254P | ++ |
| 69/70 | P233S | ++ |
| 71/72 | G130A | ++ |
| 73/74 | Q316D | ++ |
| 75/76 | P249G | + |
| 77/78 | I104P/P111A | + |
| 79/80 | I104W/P111A | + |
| 81/82 | P249S | + |
| 83/84 | D107T/P111A | + |
| 85/86 | D106G/P111A | + |
| 87/88 | R253P | + |
| 89/90 | N121H | + |
| 91/92 | Q210E | + |
| 93/94 | Y136H/P249G | + |
| 95/96 | L208V | + |
| 97/98 | N34K | + |
| 99/100 | D107S/P111A | + |
| 101/102 | D107G/P111A | + |
| 103/104 | E211T | + |
| 105/106 | E308F | + |
| 107/108 | M181L | + |
| 109/110 | P233V | + |
| 111/112 | D107A/P111A | + |
| 113/114 | N34R | + |
| 115/116 | P38V | + |
| 117/118 | P248R | + |
| 119/120 | E56S | + |
| 121/122 | Q316K | + |
| 123/124 | P248V | + |
| 125/126 | P248K | + |
| 127/128 | R89T | + |
| 129/130 | E308V | + |
| 131/132 | D106R/P111A | + |
| 133/134 | N67G | + |

Levels of increased activity were determined relative to the reference polypeptide of SEQ ID NO: 2 and defined as follows: “+” 1.67 to 5.10, “++” > 5.10, “+++” > 9.47.

### Example 8

### Improvements Over SEQ ID NO: 2 in Activity on Adenosine Using Shake Flask-Purified Enzymes

### Relative Activity Measurements of Shake-Flask-Purified AdoK Variants

[0591] AdoK variants SEQ ID NO: 2, SEQ ID NO: 90, SEQ ID NO: 136, SEQ ID NO: 138, SEQ ID NO: 140, SEQ ID NO: 142, SEQ ID NO: 144, and SEQ ID NO: 146 were expressed and purified as described in Example 3.

[0592] To assess activity, each variant was added to a 5 μL reaction at a final concentration of 0.5 μM. The reaction contained 50 mM Tris (pH 8.0), 50 mM lithium potassium acetylphosphate, 10 μM ATP, 10 mM MgCl₂, 10 μM SEQ ID NO: 1148, 10 μM SEQ ID NO: 1160, and 10 mM adenosine. Reactions were incubated in a Multitron (Infors) shaker at 30° C. and 400 rpm for 60 minutes. Reactions were then quenched and diluted 40-fold with 75% methanol and analyzed by HPLC as described in Example 5. Activity relative to SEQ ID NO: 2 (Activity FIOP) was calculated based on the percent product observed for variants compared to the percent product observed in the reaction with SEQ ID NO: 2 (where the percent product may be set as the average of replicates or else the highest single sample as appropriate). The results are shown in Table 8.1.

TABLE 8.1
Adenosine kinase activity relative to SEQ ID NO: 2

| SEQ ID | | FIOP Percent |
|---|---|---|
| NO: | Amino Acid Differences | Product Relative to |
| (nt/aa) | (Relative to SEQ ID NO: 2) | SEQ ID NO: 2 |
| 89/90 | N121H | + |
| 135/136 | P111A/N121H/P233S/Q316S | +++ |
| 137/138 | P111A/N121H/M181L/E211T/P233S/P248R/E308L/Q316S | ++ |
| 139/140 | M53L/P111A/N121H/M181L/E211T/P233S/P248R/E308L/ | + |
| | Q316S | |
| 141/142 | M53L/P111A/N121H/M181L/E211T/P233S/P248R/E308L/ | + |
| | Q316S/A320S | |
| 143/144 | M53L/G86Q/P111A/N121H/G169A/M181L/E211T/P233S/ | + |
| | P248R/E308L/Q316S/A320S | |
| 145/146 | M53L/P77V/G79A/G86Q/P111A/N121H/G169A/G170D/ | +++ |
| | M181L/E211T/P233S/K234R/P248R/E308L/Q316S/A320S | |

Levels of increased activity were determined relative to the reference polypeptide of SEQ ID NO: 2 and defined as follows: “+” 1.10 to 1.92, “++” > 1.92, “+++” > 2.63.

### Example 9

### Improvements Over SEQ ID NO: 90 in Activity on Cytidine

### HTP Screening for Improved AdoK Variants

[0593] HTP lysis and screening was carried out as in Example 7, except for the following changes. The enzyme variants were lysed at 40° C. for 60 minutes. The final reaction volumes were 5 μL. The enzyme variants were reacted individually with cytidine as the nucleoside substrate. In all reaction mixtures, 2% AdoK lysate, 20 μM adenylate kinase (SEQ ID NO: 1146), and 1 μM acetate kinase (SEQ ID NO: 1158) were used. Reactions were analyzed by HPLC as described in Example 5. Activity relative to SEQ ID NO: 90 (Activity FIOP) was calculated based on the percent product observed for variants compared to the percent product observed in the reaction with SEQ ID NO: 90 (where the percent product may be set as the average of replicates or else the highest single sample as appropriate). The results are shown in Table 9.1.

TABLE 9.1
Adenosine kinase activity relative to SEQ ID NO: 90

| SEQ ID | | FIOP Percent |
|---|---|---|
| NO: | Amino Acid Differences | Product Relative to |
| (nt/aa) | (Relative to SEQ ID NO: 90) | SEQ ID NO: 90 |
| 135/136 | P111A/P233S/Q316S | ++ |
| 147/148 | P111A/P233S/Q316E | + |
| 153/154 | I43R/P111A/P233S/Q316S | + |
| 157/158 | F109S/M181L/Q316S | + |
| 159/160 | F109S/Q316E | + |
| 163/164 | P111A/P233S | + |
| 165/166 | F109S/P233S/Q316E | ++ |
| 167/168 | P38C/L208V/E211T/E308F | + |
| 169/170 | P111A/M181L/P233S/Q316S | + |
| 171/172 | F109S/P111A/P233S/Q316S | ++ |
| 173/174 | P111A/M181L/P233S/H239Q/Q316S | + |
| 175/176 | P111A/P233S/H239Q/Q316S | + |
| 177/178 | F109S/P111A/M181L/P233S/Q316S | + |
| 181/182 | P111A/M181L/Q316E | + |
| 185/186 | I43R/P233S | + |
| 187/188 | F109S/P111A/Q316S | + |
| 193/194 | M181L/P233S | + |
| 195/196 | N34K/E211T/P248R/P249G | + |
| 197/198 | N34K/P38C/P248R/P249G | + |
| 203/204 | N34K/E308F | + |
| 205/206 | P233S/Q316E | ++ |
| 209/210 | I43R/P233S/Q316D | ++ |
| 219/220 | M181L/Q316S | ++ |
| 233/234 | N34R/P249G | + |
| 235/236 | I43R/P233S/Q316S | +++ |
| 239/240 | I43R/M181L/P233S/Q316S | + |
| 241/242 | N34R/P38C/K103R/T116M/R253P | + |
| 245/246 | N34K | ++ |
| 253/254 | K40R/I43R/F109S/M181L/ | +++ |
| | P233S/Q316D | |
| 255/256 | N34R/P38C/L208V/R253P | + |
| 257/258 | K103R/P249G/R253P/E308F | + |
| 259/260 | N34R/P38C/T116M/L208V | ++ |
| 261/262 | P38C/P249G | + |
| 263/264 | N34K/P38C/T116M/E211T/P248R/ | +++ |
| | R253P/E308L | |
| 269/270 | I43R/F109S/Q316S | ++ |
| 277/278 | T116M/R253P | ++ |
| 279/280 | F109S/P111A/P233S/Q316D | + |
| 281/282 | I43R/P111A/M181L/Q316E | + |
| 287/288 | N34R/P38C/E308F | + |
| 289/290 | F109S/P111A/M181L | +++ |
| 291/292 | P111A/G130A/P233S | +++ |
| 293/294 | P233S | +++ |
| 295/296 | N34R/P38C/T116M/E308F | +++ |
| 297/298 | F109S/P233S | +++ |
| 299/300 | K40R/I43R/F109S/P111A/M181L/ | ++ |
| | P233S/Q316S | |
| 301/302 | F109S/G130A/M181L/P233S | ++ |
| 303/304 | N34K/P38C/R253P | + |
| 305/306 | R253P | + |
| 307/308 | N34R/P38C/K103R/L208V/P249S | + |
| 309/310 | K103R/L208V/Q210E/R253P | + |
| 311/312 | G130A/M181L/P233S/Q316D | + |
| 313/314 | F109S/P111A/G130A/M181L/P233S | + |
| 315/316 | N34R/P38C/Q210E/E211T/ | + |
| | R253P/R303H | |
| 317/318 | K103R/T116M/L208V | + |
| 319/320 | N34R/T116M/P248R/E252K/R253P | ++ |
| 321/322 | N34R/P38C/K103R/Q210E/ | + |
| | E211T/P249G | |
| 323/324 | K40R/P233S/Q316S | + |
| 325/326 | N34R/P38C | + |
| 327/328 | F109S/G130A/P233S | + |
| 329/330 | P111A/G130A/M181L/P233S/Q316S | + |
| 331/332 | N34K/P38C/P249G/R253P | + |
| 333/334 | N34K/P38C/L208V/P248R | + |
| 335/336 | K40R/F109S/P111A/M181L/ | + |
| | P233S/Q316S | |
| 337/338 | G130A/Q316S | + |
| 339/340 | K40R/Q316S | + |
| 341/342 | P38C/T116M | + |
| 343/344 | N34K/P38C/T116M | + |
| 345/346 | P38C/T116M/L208V/Q210E/ | + |
| | P249G/R253P | |
| 347/348 | K40R/G130A/M181L/P233S/Q316D | + |
| 349/350 | N34R/P38C/T116M | + |
| 351/352 | N34R/P38C/R253P | + |
| 353/354 | G130A/Q316D | + |
| 355/356 | K103R/P248R/P249G | + |
| 357/358 | K103R/P248R | + |

Levels of increased activity were determined relative to the reference polypeptide of SEQ ID NO: 90 and defined as follows: “+” 1.40 to 2.73, “++” > 2.73, “+++” > 4.54.

### Example 10

### Improvements Over SEQ ID NO: 254 in the Conversion of Nucleosides to Nucleotides

### HTP Screening for Improved AdoK Variants

[0594] 05711 AdoK of SEQ ID NO: 254 was selected as the parent AdoK enzyme. Libraries of genes were produced from the parent gene using various techniques (e.g. saturation mutagenesis and recombination of previously identified beneficial mutations). The polypeptides encoded by each gene were produced in HTP and prepared as described in Table 10.1.

[0595] Reactions were performed as described in Example 4 using conditions summarized in Table 10.1. Data were collected using the TdT-coupled reaction and CE assay described in Example 6.

TABLE 10.1
Reaction conditions

Lysis Buffer-TEoA (pH 7.5), 0.1 g/L lysozyme; Lysis Conditions-100 μL, 45° C., 60 min; Reaction
buffer-50 mM Tris, 50 mM LiK(acetylphosphate), 10 μM ATP, 10 mM magnesium chloride, pH
8.0; Lysate concentration (vol %)-12.5; Reaction Conditions-1 μL, 30° C., 1 hr; Nucleoside
substrate-fA; Substrate Concentration-10 mM; Auxiliary Cascade Enzymes (AdyK/AcK)-SEQ
ID NO: 1150 (10 μM), SEQ ID NO: 1160 (10 μM); Dilution into Coupling Reaction-800X;
Substrate Oligonucleotides-SEQ ID NO: 1163, SEQ ID NO: 1164; Product Oligonucleotides-SEQ
ID NO: 1167, SEQ ID NO: 1168.

[0596] Activity relative to SEQ ID NO: 254 (Activity FIOP) was calculated based on the percentage of extension products observed for the variant compared with the percentage observed with SEQ ID NO: 254 (where the percent product may be set as the average of replicates or else the highest single sample as appropriate). The results are shown in Table 10.2.

TABLE 10.2
Adenosine kinase activity relative to SEQ ID NO: 254

| SEQ ID | | FIOP Percent |
|---|---|---|
| NO: | Amino Acid Differences | Product Relative to |
| (nt/aa) | (Relative to SEQ ID NO: 254) | SEQ ID NO: 254 |
| 359/360 | P77V/P111A/G170D/E211T/A236V | +++ |
| 361/362 | P77V/P111A/E211T | +++ |
| 363/364 | P77V/E211T | +++ |
| 365/366 | M53L/P77V/G170D/E211T/A320S | +++ |
| 367/368 | M53L/P77V/E211T/K234R/A320S | +++ |
| 369/370 | P77V/G79A/E211T/D316Y | +++ |
| 371/372 | P77V/P111A/K234R/A236V/E308L | ++ |
| 373/374 | P111A/G170D/E211T/K234R/A236V/ | ++ |
| | P248R | |
| 375/376 | P111A/G169A/G170D/K234R/A236V/ | ++ |
| | P248R | |
| 377/378 | P77V/E211T/P248R/A320S | ++ |
| 379/380 | M53L/G169A/G170D/K234R/A320S | ++ |
| 381/382 | P111A/E211T/K234R/A236V/P248R | ++ |
| 383/384 | P77V | ++ |
| 385/386 | M53L/P77V/P111A/G170D/P248R | ++ |
| 387/388 | E211T/K234R/P248R | + |
| 389/390 | P77V/G86Q/G170D/E211T/K234R/ | + |
| | E308L/A320S | |
| 391/392 | P77V/G86Q | + |
| 393/394 | M53L/P111A/G170D | + |
| 395/396 | P77V/G79A/P111A | + |
| 397/398 | M53L/P77V/P111A/G169A/A236V | + |
| 399/400 | P77V/E211T/K234R | + |
| 401/402 | E211T | + |
| 403/404 | M53L/P77V | + |
| 405/406 | G86Q/G169A/K234R | + |
| 407/408 | M53L/E211T/K234R/P248R | + |
| 409/410 | P111A/G169A/G170D/A236V/P248R | + |
| 411/412 | P77V/G79A/E211T | + |
| 413/414 | P77V/G79A/G169A/G170D | + |
| 415/416 | P77V/G79A/G86Q/G169A/A236V | + |
| 417/418 | G79A/E211T/P248R | + |
| 419/420 | G79A/E211T | + |
| 421/422 | M53L/G86Q/E211T/K234R/A236V | + |
| 423/424 | G79A/G170D/E211T | + |
| 425/426 | E308L | + |
| 427/428 | M53L/E211T | + |

Levels of increased activity were determined relative to the reference polypeptide of SEQ ID NO: 254 and defined as follows: “+” 1.31 to 3.39, “++” > 3.39, “+++” > 5.31.

### Example 11

### Improvements Over SEQ ID NO: 254 in the Conversion of Nucleosides to Nucleotides

### HTP Screening for Improved AdoK Variants

[0597] AdoK of SEQ ID NO: 254 was selected as the parent AdoK enzyme. Libraries of genes were produced from the parent gene using various techniques (e.g., saturation mutagenesis and recombination of previously identified beneficial mutations). The polypeptides encoded by each gene were produced in HTP and prepared as described in Table 11.1.

[0598] Reactions were performed as described in Example 4 using conditions summarized in Table 11.1. Data were collected using the TdT-coupled reaction and CE assay described in Example 6.

TABLE 11.1
Reaction Conditions

Lysis Buffer-TEoA (pH 7.5), 0.1 g/L lysozyme; Lysis Conditions-100 μL, 53° C., 60 min; Reaction
buffer-50 mM Tris, 50 mM LiK(acetylphosphate), 10 μM ATP, 10 mM magnesium chloride, pH
8.0; Lysate concentration (vol %)-6.25; Reaction Conditions-1 μL, 30° C., 1 hr; Nucleoside
substrate-G; Substrate Concentration-10 mM; Auxiliary Cascade Enzymes (AdyK/AcK)-SEQ ID
NO: 1150 (10 μM), SEQ ID NO: 1160 (10 μM); Dilution into Coupling Reaction-800X; Substrate
Oligonucleotides-SEQ ID NO: 1163, SEQ ID NO: 1164; Product Oligonucleotides-SEQ ID NO:
1165, SEQ ID NO: 1166.

[0599] Stability relative to SEQ ID NO: 254 (Stability FIOP) was calculated based on the percentage of extension products observed for the variant compared with the percentage observed with SEQ ID NO: 254 (where the percent product may be set as the average of replicates or else the highest single sample as appropriate). The results are shown in Table 11.2.

TABLE 11.2
Adenosine kinase activity relative to SEQ ID NO: 254

| SEQ | | FIOP Percent |
|---|---|---|
| ID | | Product Relative |
| NO: | Amino Acid Differences | to SEQ ID |
| (nt/aa) | (Relative to SEQ ID NO: 254) | NO: 254 |
| 359/360 | P77V/P111A/G170D/E211T/A236V | ++ |
| 361/362 | P77V/P111A/E211T | +++ |
| 363/364 | P77V/E211T | ++ |
| 365/366 | M53L/P77V/G170D/E211T/A320S | ++ |
| 367/368 | M53L/P77V/E211T/K234R/A320S | ++ |
| 369/370 | P77V/G79A/E211T/D316Y | +++ |
| 371/372 | P77V/P111A/K234R/A236V/E308L | ++ |
| 373/374 | P111A/G170D/E211T/K234R/ | + |
| | A236V/P248R | |
| 375/376 | P111A/G169A/G170D/K234R/ | + |
| | A236V/P248R | |
| 381/382 | P111A/E211T/K234R/A236V/P248R | + |
| 383/384 | P77V | ++ |
| 385/386 | M53L/P77V/P111A/G170D/P248R | + |
| 387/388 | E211T/K234R/P248R | + |
| 389/390 | P77V/G86Q/G170D/E211T/K234R/ | + |
| | E308L/A320S | |
| 391/392 | P77V/G86Q | + |
| 393/394 | M53L/P111A/G170D | + |
| 395/396 | P77V/G79A/P111A | ++ |
| 397/398 | M53L/P77V/P111A/G169A/A236V | +++ |
| 401/402 | E211T | + |
| 403/404 | M53L/P77V | + |
| 405/406 | G86Q/G169A/K234R | + |
| 407/408 | M53L/E211T/K234R/P248R | + |
| 409/410 | P111A/G169A/G170D/A236V/P248R | + |
| 411/412 | P77V/G79A/E211T | + |
| 413/414 | P77V/G79A/G169A/G170D | ++ |
| 415/416 | P77V/G79A/G86Q/G169A/A236V | +++ |
| 419/420 | G79A/E211T | ++ |
| 421/422 | M53L/G86Q/E211T/K234R/A236V | + |
| 423/424 | G79A/G170D/E211T | + |
| 427/428 | M53L/E211T | + |
| 429/430 | G169A/K234R/A236V | ++ |
| 431/432 | P77V/G79A/G169A/K234R/A236V | ++ |
| 433/434 | M53L/P77V/G79A | ++ |
| 435/436 | P77V/P111A | + |
| 437/438 | M53L/K234R/A236V | + |
| 439/440 | G169A/G170D | + |
| 441/442 | M53L/P77V/G79A/G169A | + |
| 443/444 | M53L/G86Q/K234R/A236V | + |
| 445/446 | M53L/G169A/K234R/A236V | + |
| 447/448 | M53L/K234R | + |
| 449/450 | P77V/G79A/G86Q/G170D/E211T/ | + |
| | K234R/A236V/E308L/A320S | |
| 451/452 | M53L/G170D | + |
| 453/454 | P77V/P248R | + |
| 455/456 | M53L/G86Q | + |

Levels of increased activity were determined relative to the reference polypeptide of SEQ ID NO: 254 and defined as follows: “+” 1.04 to 3.84, “++” >3.84, “+++” >6.79.

### Example 12

### Improvements Over SEQ ID NO: 254 in the Conversion of Nucleosides to Nucleotides

### HTP Screening for Improved AdoK Variants

[0600] SEQ ID NO: 254 was selected as the parent AdoK enzyme. Libraries of genes were produced from the parent gene using various techniques (e.g. saturation mutagenesis and recombination of previously identified beneficial mutations). The polypeptides encoded by each gene were produced in HTP and prepared as described in Table 12.1.

[0601] Reactions were performed as described in Example 4 using conditions summarized in Table 12.1. Data were collected using the TdT-coupled reaction and CE assay described in Example 6.

TABLE 12.1
Reaction conditions

Lysis Buffer - TEoA (pH 7.5), 0.1 g/L lysozyme; Lysis Conditions - 100 μL, 55° C., 60 min;
Reaction buffer - 50 mM Tris, 50 mM LiK(acetylphosphate), 10 μM ATP, 10 mM magnesium
chloride, pH 8.0; Lysate concentration (vol %) - 25; Reaction Conditions - 1 μL, 30° C., 16 hr;
Nucleoside substrate - fA; Substrate Concentration - 10 mM; Auxiliary Cascade Enzymes
(AdyK/AcK) - SEQ ID NO: 1152 (10 μM), SEQ ID NO: 1160 (10 μM); Dilution into Coupling
Reaction - 800×; Substrate Oligonucleotides - SEQ ID NO: 1163, SEQ ID NO: 1164; Product
Oligonucleotides - SEQ ID NO: 1167, SEQ ID NO: 1168.

[0602] Activity relative to SEQ ID NO: 254 (Stability FIOP) was calculated based on the percentage of extension products observed for the variant compared with the percentage observed with SEQ ID NO: 254 (where the percent product may be set as the average of replicates or else the highest single sample as appropriate). The results are shown in Table 12.2.

TABLE 12.2
Adenosine kinase activity relative to SEQ ID NO: 2

| SEQ ID | | FIOP Percent |
|---|---|---|
| NO: | Amino Acid Differences | Product Relative to |
| (nt/aa) | (Relative to SEQ ID NO: 254) | SEQ ID NO: 254 |
| 457/458 | E252T | +++ |
| 459/460 | A180Q | +++ |
| 461/462 | P129G | +++ |
| 463/464 | H121M | +++ |
| 465/466 | V255A | +++ |
| 467/468 | V255S | +++ |
| 469/470 | H121L | +++ |
| 471/472 | V255E | +++ |
| 473/474 | H119M | +++ |
| 475/476 | V256C | ++ |
| 477/478 | V255G | ++ |
| 479/480 | L237I | ++ |
| 481/482 | P249L | ++ |
| 483/484 | L20F | ++ |
| 485/486 | V255K | ++ |
| 487/488 | L237V | ++ |
| 489/490 | K234A | ++ |
| 491/492 | R254Q | ++ |
| 493/494 | V256M | ++ |
| 495/496 | E56Y | ++ |
| 497/498 | E56F | ++ |
| 499/500 | P249M | ++ |
| 501/502 | H119T | ++ |
| 503/504 | N287V | ++ |
| 505/506 | H121F | ++ |
| 507/508 | H119S | ++ |
| 509/510 | E252K | ++ |
| 511/512 | E56G | ++ |
| 513/514 | F317W | ++ |
| 515/516 | H119V | + |
| 517/518 | T299S | + |
| 519/520 | T229C | + |
| 521/522 | H119C | + |
| 523/524 | A250I | + |
| 525/526 | R254L | + |
| 527/528 | K234M | + |
| 529/530 | T229V | + |
| 531/532 | K234Y | + |
| 533/534 | N287Y | + |
| 535/536 | E295A | + |
| 537/538 | P144Q/V255W | + |
| 539/540 | H119Q | + |
| 541/542 | A291G | + |
| 543/544 | A250T | + |
| 545/546 | L181M | + |
| 547/548 | N287S | + |
| 549/550 | H119R | + |
| 551/552 | F317Y | + |
| 553/554 | H119G | + |
| 555/556 | A250M | + |
| 557/558 | P249G | + |
| 559/560 | P249I | + |
| 561/562 | L20V | + |
| 563/564 | L237M | + |
| 565/566 | S233A | + |
| 567/568 | P248G | + |
| 569/570 | Q231V | + |
| 571/572 | H251L | + |
| 573/574 | H128F | + |
| 575/576 | N287A | + |

Levels of increased activity were determined relative to the reference polypeptide of SEQ ID NO: 254 and defined as follows: “+” 1.01 to 1.23, “++” >1.23, “+++” >1.36.

### Example 13

### Improvements Over SEQ ID NO: 254 in the Conversion of Nucleosides to Nucleotides

### HTP Screening for Improved AdoK Variants

[0603] AdoK of SEQ ID NO: 254 was selected as the parent AdoK enzyme. Libraries of genes were produced from the parent gene using various techniques (e.g., saturation mutagenesis and recombination of previously identified beneficial mutations). The polypeptides encoded by each gene were produced in HTP and prepared as described in Table 13.1.

[0604] Reactions were performed as described in Example 4 using conditions summarized in Table 13.1. Data were collected using the TdT-coupled reaction and CE assay described in Example 6.

TABLE 13.1
Reaction conditions

Lysis Buffer - TEoA (pH 7.5), 0.1 g/L lysozyme; Lysis Conditions - 100 μL, 45° C., 60 min;
Reaction buffer - 50 mM Tris, 50 mM LiK(acetylphosphate), 10 μM ATP, 10 mM magnesium
chloride, pH 8.0; Lysate concentration (vol %) - 25; Reaction Conditions - 1 μL, 30° C., 16
hr; Nucleoside substrate - fG; Substrate Concentration - 10 mM; Auxiliary Cascade Enzymes
(AdyK/AcK) - SEQ ID NO: 1152 (10 μM), SEQ ID NO: 1160 (10 μM); Dilution into
Coupling Reaction - 800×; Substrate Oligonucleotides - SEQ ID NO: 1163, SEQ ID NO:
1164; Product Oligonucleotides - SEQ ID NO: 1169, SEQ ID NO: 1170.

[0605] Activity relative to SEQ ID NO: 254 (Activity FIOP) was calculated based on the percentage of extension products observed for the variant compared with the percentage observed with SEQ ID NO: 254 (where the percent product may be set as the average of replicates or else the highest single sample as appropriate). The results are shown in Table 13.2.

TABLE 13.2
Adenosine kinase activity relative to SEQ ID NO: 254

| SEQ ID | | FIOP Percent |
|---|---|---|
| NO: | Amino Acid Differences | Product Relative to |
| (nt/aa) | (Relative to SEQ ID NO: 254) | SEQ ID NO: 254 |
| 457/458 | E252T | ++ |
| 461/462 | P129G | +++ |
| 463/464 | H121M | + |
| 465/466 | V255A | +++ |
| 467/468 | V255S | + |
| 469/470 | H121L | ++ |
| 473/474 | H119M | ++ |
| 475/476 | V256C | + |
| 477/478 | V255G | ++ |
| 483/484 | L20F | +++ |
| 485/486 | V255K | +++ |
| 489/490 | K234A | + |
| 493/494 | V256M | ++ |
| 495/496 | E56Y | + |
| 497/498 | E56F | ++ |
| 501/502 | H119T | + |
| 505/506 | H121F | + |
| 507/508 | H119S | + |
| 511/512 | E56G | +++ |
| 515/516 | H119V | + |
| 517/518 | T299S | +++ |
| 519/520 | T229C | + |
| 521/522 | H119C | + |
| 523/524 | A250I | + |
| 535/536 | E295A | ++ |
| 539/540 | H119Q | + |
| 549/550 | H119R | ++ |
| 551/552 | F317Y | + |
| 553/554 | H119G | + |
| 569/570 | Q231V | + |
| 577/578 | L181V | +++ |
| 579/580 | R156Y | + |
| 581/582 | I247L | + |
| 583/584 | L288V | + |
| 585/586 | L292K | + |
| 587/588 | L181A | + |
| 589/590 | P249R | + |
| 591/592 | A250H | + |

Levels of increased activity were determined relative to the reference polypeptide of SEQ ID NO: 254 and defined as follows: “+” 1.14 to 1.85, “++” >1.85, “+++” >2.43.

### Example 14

### Improvements Over SEQ ID NO: 370 in the Conversion of Nucleosides to Nucleotides

### HTP Screening for Improved AdoK Variants

[0606] AdoK of SEQ ID NO: 370 was selected as the parent AdoK enzyme. Libraries of genes were produced from the parent gene using various techniques (e.g., saturation mutagenesis and recombination of previously identified beneficial mutations). The polypeptides encoded by each gene were produced in HTP and prepared as described in Table 14.1.

[0607] Reactions were performed as described in Example 4 using conditions summarized in Table 14.1. Data were collected using the TdT-coupled reaction and CE assay described in Example 6.

TABLE 14.1
Reaction conditions

Lysis Buffer - TEoA (pH 7.5), 0.1 g/L lysozyme; Lysis Conditions - 100 μL, 45° C., 60 min;
Reaction buffer - 50 mM Tris, 50 mM LiK(acetylphosphate), 10 μM ATP, 10 mM magnesium
chloride, pH 8.0; Lysate concentration (vol %) - 25; Reaction Conditions - 1 μL, 30° C., 1 hr;
Nucleoside substrate - fG; Substrate Concentration - 10 mM; Auxiliary Cascade Enzymes
(AdyK/AcK) - SEQ ID NO: 1152 (10 μM), SEQ ID NO: 1160 (10 μM); Dilution into Coupling
Reaction - 160×; Substrate Oligonucleotides - SEQ ID NO: 1163, SEQ ID NO: 1164; Product
Oligonucleotides - SEQ ID NO: 1169, SEQ ID NO: 1170.

[0608] Activity relative to SEQ ID NO: 370 (Activity FIOP) was calculated based on the percentage of extension products observed for the variant compared with the percentage observed with SEQ ID NO: 370 (where the percent product may be set as the average of replicates or else the highest single sample as appropriate). The results are shown in Table 14.2.

TABLE 14.2
Adenosine kinase activity relative to SEQ ID NO: 370

| SEQ ID | | FIOP Percent |
|---|---|---|
| NO: | Amino Acid Differences | Product Relative to |
| (nt/aa) | (Relative to SEQ ID NO: 370) | SEQ ID NO: 370 |
| 593/594 | T299G | +++ |
| 595/596 | A21G | +++ |
| 597/598 | T299S | +++ |
| 599/600 | A113S | +++ |
| 601/602 | G152C | +++ |
| 603/604 | G169D/V255C | ++ |
| 605/606 | H251K | ++ |
| 607/608 | V294L | ++ |
| 609/610 | V255S | ++ |
| 611/612 | N202F/T211A | ++ |
| 613/614 | Q31L | + |
| 615/616 | P129A | + |
| 617/618 | E252V | + |
| 619/620 | V27A/164M | + |
| 621/622 | H128W | + |
| 623/624 | P248L | + |
| 625/626 | H251V | + |
| 627/628 | K234V | + |
| 629/630 | L288V | + |
| 631/632 | L20V | + |
| 633/634 | P111L | + |
| 635/636 | Q112L | + |
| 637/638 | L181C | + |
| 639/640 | H119C | + |
| 641/642 | I64T | + |
| 643/644 | H251T | + |
| 645/646 | G155W | + |
| 647/648 | V256H | + |
| 649/650 | H128F | + |
| 651/652 | R254I | + |
| 653/654 | P248G | + |
| 655/656 | L292F | + |
| 657/658 | E252C | + |
| 659/660 | K234N | + |
| 661/662 | L181A | + |
| 663/664 | Q31W | + |
| 665/666 | F265Y | + |
| 667/668 | H251L | + |
| 669/670 | G152A | + |
| 671/672 | K234M | + |
| 673/674 | P177V | + |
| 675/676 | G232S | + |
| 677/678 | D120C | + |
| 679/680 | Q31F | + |
| 681/682 | L183M | + |

Levels of increased activity were determined relative to the reference polypeptide of SEQ ID NO: 370 and defined as follows: “+” 1.13 to 2.30, “++” >2.30, “+++” >3.99.

### Example 15

### Improvements Over SEQ ID NO: 370 in the Conversion of Nucleosides to Nucleotides

### HTP Screening for Improved AdoK Variants

[0609] SEQ ID NO: 370 was selected as the parent AdoK enzyme. Libraries of genes were produced from the parent gene using various techniques (e.g., saturation mutagenesis and recombination of previously identified beneficial mutations). The polypeptides encoded by each gene were produced in HTP and prepared as described in Table 16.1.

[0610] Reactions were performed as described in Example 4 using conditions summarized in Table 16.1. Data were collected using the TdT-coupled reaction and CE assay described in Example 6.

TABLE 15.1
Reaction conditions

Lysis Buffer - TEoA (pH 7.5), 0.1 g/L lysozyme; Lysis Conditions - 100 μL, 60° C., 60 min;
Reaction buffer - 50 mM Tris, 50 mM LiK(acetylphosphate), 10 μM ATP, 10 mM magnesium
chloride, pH 8.0; Lysate concentration (vol %) - 12.5; Reaction Conditions - 1 μL, 30° C., 1 hr;
Nucleoside substrate - fA; Substrate Concentration - 10 mM; Auxiliary Cascade Enzymes
(AdyK/AcK) - SEQ ID NO: 1152 (10 μM), SEQ ID NO: 1160 (10 μM); Dilution into Coupling
Reaction - 800×; Substrate Oligonucleotides - SEQ ID NO: 1163, SEQ ID NO: 1164; Product
Oligonucleotides - SEQ ID NO: 1167, SEQ ID NO: 1168.

[0611] Activity relative to SEQ ID NO: 370 (Stability FIOP) was calculated based on the percentage of extension products observed for the variant compared with the percentage observed with SEQ ID NO: 370 (where the percent product may be set as the average of replicates or else the highest single sample as appropriate). The results are shown in Table 15.2.

TABLE 15.2
Adenosine kinase activity relative to SEQ ID NO: 370

| SEQ ID | | FIOP Percent |
|---|---|---|
| NO: | Amino Acid Differences | Product Relative to |
| (nt/aa) | (Relative to SEQ ID NO: 370) | SEQ ID NO: 370 |
| 683/684 | K234A/E252T | +++ |
| 685/686 | L181V/A250I/E252T/T299S | +++ |
| 687/688 | H119R/L181V/K234A/A250I/T299S | +++ |
| 689/690 | P129G/K234A/E252T | +++ |
| 691/692 | H119M/P129G/K234A | +++ |
| 693/694 | H119M/L181V/K234A/A250I/V256M/T299S | +++ |
| 695/696 | H119R/L181V/A250I/E252T | +++ |
| 697/698 | H119M/L181V/K234A/T299S | +++ |
| 699/700 | K234A/A250I/E252T | +++ |
| 701/702 | H119R/L181V/E252T/T299S | +++ |
| 703/704 | P129G/L181V/K234A/T299S | +++ |
| 705/706 | E56G/H121L/T229V | +++ |
| 707/708 | L181V/V255A/T299S | +++ |
| 709/710 | H119M/T299S | +++ |
| 711/712 | H119R/A250I/V255K/T299S | +++ |
| 713/714 | H119R/L181V/K234A/T299S | ++ |
| 715/716 | E252T | ++ |
| 717/718 | T80M/H119M/E252T | ++ |
| 719/720 | H119M/P129G | ++ |
| 721/722 | H119M/P129G/A250I | ++ |
| 723/724 | L181V/K234A/E252T/T299S | ++ |
| 725/726 | L181V/A250I/T299S | ++ |
| 727/728 | E252T/T299S | ++ |
| 729/730 | H119M/L181V/T299S | ++ |
| 731/732 | H119R/P129G/T299S | ++ |
| 733/734 | H119M/P129G/K234A/E252T | ++ |
| 735/736 | H119M/P129G/K234A/A250I/T299S | ++ |
| 737/738 | H119M/L181V/K234A/E252T | ++ |
| 739/740 | P129G/K234A/V255K/T299S | ++ |
| 741/742 | L181V/T299S | ++ |
| 743/744 | A250I/E252T | ++ |
| 745/746 | A250I/V255K/T299S | ++ |
| 747/748 | H119R/L181V/T299S | ++ |
| 749/750 | H119M/K234A/T299S | ++ |
| 751/752 | H119R/T299S | ++ |
| 753/754 | H119M/L181V/A250I | + |
| 755/756 | P129G | + |
| 757/758 | E56G/L237V | + |
| 759/760 | A250I/T299S | + |
| 761/762 | H119M/K234A/V255K/V256M/T299S | + |
| 763/764 | E56G/T229V/R254L | + |
| 765/766 | H119R/P129G/L181V | + |
| 767/768 | E56G/H121M/E295A/F317Y | + |
| 769/770 | H119R/L181V/A250I/V255A/V256M | + |
| 771/772 | T229V | + |
| 773/774 | A250I | + |
| 775/776 | H119M | + |
| 777/778 | H119M/K234A | + |
| 779/780 | L20F/T229V/L237V/F317Y | + |
| 781/782 | L181V/A250I | + |
| 783/784 | H119M/V255K | + |
| 785/786 | H121M/R156Y/T229V | + |
| 787/788 | E56G/H121M/L237V | + |
| 789/790 | L237V/F317Y | + |
| 791/792 | E56G/E295A | + |
| 793/794 | E56G/H121M/T229V/A236S/R254L/E295A | + |
| 795/796 | E56G/R254L | + |
| 797/798 | H119R/A250I/T299S | + |
| 799/800 | T229V/L237V/E295A | + |
| 801/802 | L20F/T229V/F317Y | + |
| 803/804 | K234A | + |
| 805/806 | H119R/K234A | + |
| 807/808 | R254L | + |
| 809/810 | T229V/E295A | + |
| 811/812 | R156Y/T229V | + |
| 813/814 | E56F/H121M/T229V/L237V/E295A | + |
| 815/816 | E56F/L237V | + |
| 817/818 | L237V/R254L | + |

Levels of increased activity were determined relative to the reference polypeptide of SEQ ID NO: 370 and defined as follows: “+” 1.18 to 14.77, “++” >14.77, “+++” >26.66.

### Example 16

### Improvements Over SEQ ID NO: 370 in the Conversion of Nucleosides to Nucleotides

### HTP Screening for Improved AdoK Variants

[0612] AdoK of SEQ ID NO: 370 was selected as the parent AdoK enzyme. Libraries of genes were produced from the parent gene using various techniques (e.g., saturation mutagenesis and recombination of previously identified beneficial mutations). The polypeptides encoded by each gene were produced in HTP and prepared as described in Table 16.1.

[0613] Reactions were performed as described in Example 4 using conditions summarized in Table 16.1. Data were collected using the TdT-coupled reaction and CE assay described in Example 6.

TABLE 16.1
Reaction conditions

Lysis Buffer - TEoA (pH 7.5), 0.1 g/L lysozyme; Lysis Conditions - 100 μL, 45° C., 60 min;
Reaction buffer - 50 mM Tris, 50 mM LiK(acetylphosphate), 10 μM ATP, 10 mM magnesium
chloride, pH 8.0; Lysate concentration (vol %) - 25; Reaction Conditions - 1 μL, 30° C., 1 hr;
Nucleoside substrate - fG; Substrate Concentration - 10 mM; Auxiliary Cascade Enzymes
(AdyK/AcK) - SEQ ID NO: 1152 (10 μM), SEQ ID NO: 1160 (10 μM); Dilution into Coupling
Reaction - 800×; Substrate Oligonucleotides - SEQ ID NO: 1163, SEQ ID NO: 1164; Product
Oligonucleotides - SEQ ID NO: 1169, SEQ ID NO: 1170.

[0614] Activity relative to SEQ ID NO: 370 (Activity FIOP) was calculated based on the percentage of extension products observed for the variant compared with the percentage observed with SEQ ID NO: 370 (where the percent product may be set as the average of replicates or else the highest single sample as appropriate). The results are shown in Table 16.2.

TABLE 16.2
Adenosine kinase activity relative to SEQ ID NO: 370

| SEQ ID | | FIOP Percent |
|---|---|---|
| NO: | Amino Acid Differences | Product Relative to |
| (nt/aa) | (Relative to SEQ ID NO: 370) | SEQ ID NO: 370 |
| 683/684 | K234A/E252T | ++ |
| 685/686 | L181V/A250I/E252T/T299S | +++ |
| 687/688 | H119R/L181V/K234A/A250I/T299S | ++ |
| 689/690 | P129G/K234A/E252T | +++ |
| 691/692 | H119M/P129G/K234A | ++ |
| 693/694 | H119M/L181V/K234A/A250I/V256M/T299S | +++ |
| 695/696 | H119R/L181V/A250I/E252T | + |
| 697/698 | H119M/L181V/K234A/T299S | ++ |
| 699/700 | K234A/A250I/E252T | + |
| 701/702 | H119R/L181V/E252T/T299S | ++ |
| 703/704 | P129G/L181V/K234A/T299S | +++ |
| 705/706 | E56G/H121L/T229V | +++ |
| 707/708 | L181V/V255A/T299S | ++ |
| 709/710 | H119M/T299S | ++ |
| 711/712 | H119R/A250I/V255K/T299S | + |
| 713/714 | H119R/L181V/K234A/T299S | +++ |
| 715/716 | E252T | + |
| 717/718 | T80M/H119M/E252T | + |
| 719/720 | H119M/P129G | +++ |
| 721/722 | H119M/P129G/A250I | + |
| 723/724 | L181V/K234A/E252T/T299S | ++ |
| 725/726 | L181V/A250I/T299S | ++ |
| 727/728 | E252T/T299S | +++ |
| 729/730 | H119M/L181V/T299S | +++ |
| 731/732 | H119R/P129G/T299S | +++ |
| 733/734 | H119M/P129G/K234A/E252T | +++ |
| 735/736 | H119M/P129G/K234A/A250I/T299S | +++ |
| 737/738 | H119M/L181V/K234A/E252T | +++ |
| 739/740 | P129G/K234A/V255K/T299S | +++ |
| 741/742 | L181V/T299S | +++ |
| 743/744 | A250I/E252T | + |
| 745/746 | A250I/V255K/T299S | +++ |
| 747/748 | H119R/L181V/T299S | ++ |
| 749/750 | H119M/K234A/T299S | +++ |
| 751/752 | H119R/T299S | ++ |
| 755/756 | P129G | + |
| 757/758 | E56G/L237V | ++ |
| 761/762 | H119M/K234A/V255K/V256M/T299S | ++ |
| 763/764 | E56G/T229V/R254L | + |
| 765/766 | H119R/P129G/L181V | +++ |
| 767/768 | E56G/H121M/E295A/F317Y | ++ |
| 769/770 | H119R/L181V/A250I/V255A/V256M | ++ |
| 773/774 | A250I | + |
| 775/776 | H119M | + |
| 777/778 | H119M/K234A | + |
| 779/780 | L20F/T229V/L237V/F317Y | + |
| 781/782 | L181V/A250I | + |
| 783/784 | H119M/V255K | + |
| 787/788 | E56G/H121M/L237V | ++ |
| 791/792 | E56G/E295A | ++ |
| 793/794 | E56G/H121M/T229V/A236S/R254L/E295A | ++ |
| 795/796 | E56G/R254L | + |
| 799/800 | T229V/L237V/E295A | + |
| 803/804 | K234A | + |
| 805/806 | H119R/K234A | + |
| 807/808 | R254L | + |
| 811/812 | R156Y/T229V | + |
| 813/814 | E56F/H121M/T229V/L237V/E295A | + |
| 815/816 | E56F/L237V | + |
| 819/820 | T299S | +++ |
| 821/822 | L20F/E56G | ++ |
| 823/824 | E56G/R156Y | + |
| 825/826 | E56G/R156Y/R254L/E295A | + |
| 827/828 | L20F/E56G/T229V | + |
| 829/830 | H119M/P129G/L181V/K234A | + |
| 831/832 | L237V | + |
| 833/834 | L20F | + |
| 835/836 | E56F/R156Y/T229V/L237V | + |
| 837/838 | E56F/R254L | + |
| 839/840 | L20F/E56G/V102I/T229V | + |
| 841/842 | L20F/E56F | + |
| 843/844 | V256M | + |
| 845/846 | H119M/L181V/K234A | + |
| 847/848 | L20F/T229V | + |
| 849/850 | E56F/H121M/R156Y/L237V | + |
| 851/852 | E56F/R156Y/T229V | + |
| 853/854 | L20F/E56G/R156Y/T229V/L237V/E295A | + |
| 855/856 | E56F/T229V/R254L | + |
| 857/858 | L20F/E56F/H121M/L237V/F317Y | + |
| 859/860 | L20F/E56F/T229V | + |
| 861/862 | H119R/L181V/K234A | + |
| 863/864 | H119R | + |
| 865/866 | R156Y | + |
| 867/868 | R156Y/L237V/E295A | + |
| 869/870 | L20F/E56F/H121M | + |
| 871/872 | H119M/L181V | + |
| 873/874 | L20F/E56G/T229V/R254L | + |
| 875/876 | E56F | + |
| 877/878 | H121M/R254L | + |
| 879/880 | L20F/E295A | + |
| 881/882 | V255K/V256M | + |
| 883/884 | E56F/H121M/T229V/R254L | + |
| 885/886 | H119M/P129G/K234A/V255A/V256M | + |
| 887/888 | H119R/L181V | + |

Levels of increased activity were determined relative to the reference polypeptide of SEQ ID NO: 370 and defined as follows: “+” 1.30 to 18.03, “++” >18.03, “+++” >34.76.

### Example 17

### Improvements Over SEQ ID NO: 734 in the Conversion of Nucleosides to Nucleotides

### HTP Screening for Improved AdoK Variants

[0615] AdoK of SEQ ID NO: 734 was selected as the parent AdoK enzyme. Libraries of genes were produced from the parent gene using various techniques (e.g., saturation mutagenesis and recombination of previously identified beneficial mutations). The polypeptides encoded by each gene were produced in HTP and prepared as described in Table 17.1.

[0616] Reactions were performed as described in Example 4 using conditions summarized in Table 17.1. Data were collected using the TdT-coupled reaction and CE assay described in Example 6.

TABLE 17.1
Reaction conditions

Lysis Buffer - TEoA (pH 7.5), 0.1 g/L lysozyme; Lysis Conditions - 100 μL, 50° C., 60 min;
Reaction buffer - 50 mM Tris, 50 mM LiK(acetylphosphate), 10 μM ATP, 10 mM magnesium
chloride, pH 8.0; Ly sate concentration (vol %) - 25; Reaction Conditions - 1 μL, 30° C., 1 hr;
Nucleoside substrate - mA; Substrate Concentration - 10 mM; Auxiliary Cascade Enzymes
(AdyK/AcK) - SEQ ID NO: 1154 (10 μM), SEQ ID NO: 1160 (10 μM); Dilution into Coupling
Reaction - 800×; Substrate Oligonucleotides - SEQ ID NO: 1163, SEQ ID NO: 1164; Product
Oligonucleotides - SEQ ID NO: 1171, SEQ ID NO: 1172.

[0617] Activity relative to SEQ ID NO: 734 (Activity FIOP) was calculated based on the percentage of extension products observed for the variant compared with the percentage observed with SEQ ID NO: 734 (where the percent product may be set as the average of replicates or else the highest single sample as appropriate). The results are shown in Table 17.2.

TABLE 17.2
Adenosine kinase activity relative to SEQ ID NO: 734

| SEQ ID | | FIOP Percent Product |
|---|---|---|
| NO: | Amino Acid Differences | Relative to |
| (nt/aa) | (Relative to SEQ ID NO: 734) | SEQ ID NO: 734 |
| 889/890 | E56G/T229V | +++ |
| 891/892 | A21G/E56G | +++ |
| 893/894 | L181V | +++ |
| 895/896 | L181V/T211A/H251K | +++ |
| 897/898 | L181V/T211A | +++ |
| 899/900 | A21G/H121L/T299S | +++ |
| 901/902 | T229V | +++ |
| 903/904 | E56G | +++ |
| 905/906 | E56G/G169D | +++ |
| 907/908 | D311Q | +++ |
| 909/910 | R52D | +++ |
| 911/912 | G170R | +++ |
| 913/914 | Q31L/L181V/T211A | +++ |
| 915/916 | A167W | ++ |
| 917/918 | G170H | ++ |
| 919/920 | R303M | ++ |
| 921/922 | S222G | ++ |
| 923/924 | R43V | ++ |
| 925/926 | Q83V | ++ |
| 927/928 | A113S/L181V/T211A | ++ |
| 929/930 | H251K | ++ |
| 931/932 | P187V | ++ |
| 933/934 | Q218V | ++ |
| 935/936 | L181V/H251K | ++ |
| 937/938 | Q195T | ++ |
| 939/940 | H121L/T229V | ++ |
| 941/942 | D107H | ++ |
| 943/944 | R141S | ++ |
| 945/946 | Q31L/L181V | ++ |
| 947/948 | A307F | ++ |
| 949/950 | S100G | ++ |
| 951/952 | G169L | ++ |
| 953/954 | G169M | ++ |
| 955/956 | R52G | ++ |
| 957/958 | G86L | + |
| 959/960 | E90L | + |
| 961/962 | D311G | + |
| 963/964 | E164W | + |
| 965/966 | N310C | + |
| 967/968 | A167F | + |
| 969/970 | N276E | + |
| 971/972 | H35V | + |
| 973/974 | E56G/R134H | + |
| 975/976 | T211M | + |
| 977/978 | G170V | + |
| 979/980 | V50C | + |
| 981/982 | V41L | + |
| 983/984 | D311S | + |
| 985/986 | H121L/G169D/T229V | + |
| 987/988 | A74I | + |
| 989/990 | Q225G | + |
| 991/992 | D106G | + |
| 993/994 | H121L | + |
| 995/996 | Q31L/A113S/L181V | + |
| 997/998 | E191A | + |
| 999/1000 | E191S | + |
| 1001/1002 | T211I | + |
| 1003/1004 | H35S | + |
| 1005/1006 | R190I | + |
| 1007/1008 | E164K | + |
| 1009/1010 | I171C | + |
| 1011/1012 | T211F | + |
| 1013/1014 | T211L | + |
| 1015/1016 | Q225E | + |
| 1017/1018 | Q195G | + |
| 1019/1020 | D311R | + |
| 1021/1022 | A167V | + |
| 1023/1024 | D311L | + |
| 1025/1026 | A168V | + |
| 1027/1028 | A168R | + |
| 1029/1030 | T211C | + |
| 1031/1032 | Q31L/L181V/T211A/V294L | + |
| 1033/1034 | G73M | + |
| 1035/1036 | N276S | + |
| 1037/1038 | A74V | + |
| 1039/1040 | E164S | + |
| 1041/1042 | Q31L/H251K | + |
| 1043/1044 | G169S | + |
| 1045/1046 | Q31L | + |
| 1047/1048 | G169D | + |
| 1049/1050 | A196S | + |
| 1051/1052 | R52C | + |
| 1053/1054 | Q218L | + |
| 1055/1056 | G169C | + |
| 1057/1058 | R89G | + |
| 1059/1060 | E90R | + |
| 1061/1062 | G73E | + |
| 1063/1064 | A167T | + |
| 1065/1066 | D197R | + |
| 1067/1068 | E242D | + |

Levels of increased activity were determined relative to the reference polypeptide of SEQ ID NO: 734 and defined as follows: “+” 1.10 to 1.50, “++” >1.50, “+++” >1.93.

### Example 18

### Improvements Over SEQ ID NO: 734 in the Conversion of Nucleosides to Nucleotides

### HTP Screening for Improved AdoK Variants

[0618] AdoK of SEQ ID NO: 734 was selected as the parent AdoK enzyme. Libraries of genes were produced from the parent gene using various techniques (e.g., saturation mutagenesis and recombination of previously identified beneficial mutations). The polypeptides encoded by each gene were produced in HTP and prepared as described in Table 18.1.

[0619] Reactions were performed as described in Example 4 using conditions summarized in Table 18.1. Data were collected using the TdT-coupled reaction and CE assay described in Example 6.

TABLE 18.1
Reaction conditions

Lysis Buffer - TEoA (pH 7.5), 0.1 g/L lysozyme; Lysis Conditions - 100 μL, 67° C., 60 min;
Reaction buffer - 50 mM Tris, 50 mM LiK(acetylphosphate), 10 μM ATP, 10 mM magnesium
chloride, pH 8.0; Lysate concentration (vol %) - 25; Reaction Conditions - 1 μL, 30° C., 1 hr;
Nucleoside substrate - fG; Substrate Concentration - 10 mM; Auxiliary Cascade Enzymes
(AdyK/AcK) - SEQ ID NO: 1154 (10 μM), SEQ ID NO: 1160 (10 μM); Dilution into Coupling
Reaction - 800×; Substrate Oligonucleotides - SEQ ID NO: 1163, SEQ ID NO: 1164; Product
Oligonucleotides - SEQ ID NO: 1169, SEQ ID NO: 1170.

[0620] Stability relative to SEQ ID NO: 734 (Stability FIOP) was calculated based on the percentage of extension products observed for the variant compared with the percentage observed with SEQ ID NO: 734 (where the percent product may be set as the average of replicates or else the highest single sample as appropriate). The results are shown in Table 18.2.

TABLE 18.2
Adenosine kinase activity relative to SEQ ID NO: 734

| | Amino Acid | |
|---|---|---|
| SEQ ID | Differences | FIOP Percent |
| NO: | (Relative to | Product Relative to |
| (nt/aa) | SEQ ID NO: 734) | SEQ ID NO: 734 |
| 907/908 | D311Q | ++ |
| 909/910 | R52D | +++ |
| 925/926 | Q83V | + |
| 931/932 | P187V | + |
| 943/944 | R141S | + |
| 953/954 | G169M | + |
| 955/956 | R52G | ++ |
| 967/968 | A167F | ++ |
| 971/972 | H35V | + |
| 975/976 | T211M | ++ |
| 981/982 | V41L | +++ |
| 983/984 | D311S | + |
| 997/998 | E191A | + |
| 1001/1002 | T211I | + |
| 1003/1004 | H35S | + |
| 1007/1008 | E164K | + |
| 1011/1012 | T211F | + |
| 1013/1014 | T211L | +++ |
| 1019/1020 | D311R | +++ |
| 1023/1024 | D311L | + |
| 1049/1050 | A196S | + |
| 1061/1062 | G73E | + |
| 1069/1070 | P51S | +++ |
| 1071/1072 | K103L | ++ |
| 1073/1074 | E191R | ++ |
| 1075/1076 | R101F | ++ |
| 1077/1078 | Q83T | + |
| 1079/1080 | R52F | + |
| 1081/1082 | E164G | + |
| 1083/1084 | Q195M | + |
| 1085/1086 | R43K | + |
| 1087/1088 | T147S | + |
| 1089/1090 | P187Q | + |
| 1091/1092 | D311M | + |
| 1093/1094 | R40W | + |
| 1095/1096 | G169I | + |
| 1097/1098 | E242T | + |
| 1099/1100 | R101W | + |
| 1101/1102 | Q83L | + |
| 1103/1104 | S222M | + |
| 1105/1106 | G170S | + |
| 1107/1108 | D311F | + |
| 1109/1110 | V146I | + |
| 1111/1112 | Q83S | + |
| 1113/1114 | K243R | + |
| 1115/1116 | A74T | + |
| 1117/1118 | D311T | + |
| 1119/1120 | Q218N | + |
| 1121/1122 | A74F | + |
| 1123/1124 | R303V | + |
| 1125/1126 | Q83F | + |
| 1127/1128 | E90V | + |
| 1129/1130 | A74K | + |
| 1131/1132 | R303F | + |
| 1133/1134 | N310A | + |
| 1135/1136 | K243G | + |
| 1137/1138 | S222A | + |
| 1139/1140 | R43S | + |
| 1141/1142 | R303W | + |

Levels of increased activity were determined relative to the reference polypeptide of SEQ ID NO: 734 and defined as follows: “+” 1.22 to 6.75, “++” >6.75, “+++” >18.28.

### Example 19

### Relative Activities of AdoK Variants for the Conversion of Nucleosides to Nucleotides

### Shake Flask Characterization of AdoK Variants

[0621] AdoK variants SEQ ID NO: 2, SEQ ID NO: 90, SEQ ID NO: 254, SEQ ID NO: 370, SEQ ID NO: 734, and SEQ ID NO: 896 were expressed and purified as described in Example 3.

[0622] To assess activity, each variant was added to a 5 μL reaction at a final concentration of 10 μM. The reaction contained 50 mM Tri s (pH 8.0), 50 mM lithium potassium acetylphosphate, 10 μM ATP, 10 mM MgCl₂, 10 μM SEQ ID NO: 1156, 10 μM SEQ ID NO: 1160, and 10 mM nucleoside. Reactions were incubated in a Multitron (Infors) shaker at 30° C. & 400 rpm for 60 minutes. Reactions were then quenched and diluted 40-fold with 75% methanol and analyzed by HPLC as described in Example 5. Relative activities were normalized to the lowest observed activity by a variant on a given substrate. The results are shown in Table 19.1.

TABLE 19.1

| SEQ ID | | | | | | | | | |
|---|---|---|---|---|---|---|---|---|---|
| NO: | Relative Activities of AdoK Variants on Nucleoside Substrates | | | | | | | | |
| (nt/aa) | A | C | G | U | fA | fC | fG | fU | mA |
| 1/2 | ~ | ~ | ++ | + | + | − | ++ | − | − |
| 89/90 | ~ | ~ | ++ | + | ++ | − | +++ | − | − |
| 253/254 | ~ | ~ | ++ | ~ | ~ | − | ~ | − | − |
| 369/370 | ~ | ~ | ++ | + | ++ | ~ | ++ | ~ | ~ |
| 733/734 | ~ | ~ | ++ | + | ++ | ++ | +++ | ++ | +++ |
| 895/896 | ~ | ~ | ~ | + | ++ | +++ | +++ | +++ | +++ |

Levels of relative activity were measured for the listed variants and defined as follows: “−” 0.00 to 0.99, “~” ≥ 1.0, “+” > 1.06, “++” > 2.00, “+++” > 29.90.

### Example 20

### Activity Improvements Over SEQ ID NO: 734 in the Conversion of Nucleosides to Nucleotides

### HTP Screening for Improved AdoK Variants

[0623] AdoK of SEQ ID NO: 734 was selected as the parent AdoK enzyme. Libraries of genes were produced from the parent gene using various techniques (e.g. saturation mutagenesis and recombination of previously identified beneficial mutations). The polypeptides encoded by each gene were produced in HTP and prepared as described in Table 20.1.

[0624] Reactions were performed as described in Example 4 using conditions summarized in Table 20.1. Data were collected using the TdT-coupled reaction and CE assay described in Example 6.

TABLE 20.1
Reaction conditions

Lysis Buffer-TEoA (pH 7.5), 0.1 g/L lysozyme; Lysis Conditions-100 μL, 50° C., 60 min; Reaction
buffer-50 mM Tris, 50 mM LiK(acetylphosphate), 10 μM ATP, 10 mM magnesium chloride, pH 8.0;
Lysate concentration (vol %)-25; Reaction Conditions-1 μL, 30° C., 1 hr; Nucleoside substrate-mA;
Substrate Concentration-10 mM; Auxiliary Cascade Enzymes (AdyK/AcK)-SEQ ID NO: 1154 (10
uM), SEQ ID NO: 1160 (10 uM); Dilution into Coupling Reaction-80×; Substrate Oligonucleotides-
SEQ ID NO: 1163, SEQ ID NO: 1164; Product Oligonucleotide-SEQ ID NO: 1171, SEQ ID NO:
1172.

[0625] Activity relative to SEQ ID NO: 734 (activity FIOP) was calculated based on the percentage of extension products observed for the variant compared with the percentage observed with SEQ ID NO: 734 (where the percent product may be set as the average of replicates or else the highest single sample as appropriate). The results are shown in Table 20.2.

TABLE 20.2
Adenosine kinase activity relative to SEQ ID NO: 734

| SEQ ID | | FIOP Activity 1 |
|---|---|---|
| NO: | Amino Acid Differences | Relative to |
| (nt/aa) | (Relative to SEQ ID NO: 734) | SEQ ID NO: 734 |
| 889/890 | E56G/T229V | +++ |
| 891/892 | A21G/E56G | +++ |
| 893/894 | L181V | +++ |
| 895/896 | L181V/T211A/H251K | +++ |
| 897/898 | L181V/T211A | +++ |
| 899/900 | A21G/H121L/T299S | ++ |
| 901/902 | T229V | ++ |
| 903/904 | E56G | ++ |
| 905/906 | E56G/G169D | ++ |
| 913/914 | Q31L/L181V/T211A | ++ |
| 927/928 | A113S/L181V/T211A | ++ |
| 929/930 | H251K | ++ |
| 935/936 | L181V/H251K | ++ |
| 939/940 | H121L/T229V | + |
| 945/946 | Q31L/L181V | + |
| 973/974 | E56G/R134H | + |
| 985/986 | H121L/G169D/T229V | + |
| 993/994 | H121L | + |
| 995/996 | Q31L/A113S/L181V | + |
| 1031/1032 | Q31L/L181V/T211A/V294L | + |
| 1041/1042 | Q31L/H251K | + |
| 1045/1046 | Q31L | + |
| 1191/1192 | E56G/H121L/T229V | +++ |
| 1193/1194 | Q31L/T211A | + |

Levels of increased activity were determined FIOP activity 1 relative to SEQ ID NO: 734 and are defined as follows: “+” >1.05, “++” >1.71, “+++” >2.27.

### Example 21

### Stability Improvements Over SEQ ID NO: 734 in the Conversion of Nucleosides to Nucleotides

### HTP Screening for Improved AdoK Variants

[0626] AdoK of SEQ ID NO: 734 was selected as the parent AdoK enzyme. Libraries of genes were produced from the parent gene using various techniques (e.g., saturation mutagenesis and recombination of previously identified beneficial mutations). The polypeptides encoded by each gene were produced in HTP and prepared as described in Table 21.1.

[0627] Reactions were performed as described in Example 4 using conditions summarized in Table 21.1. Data were collected using the TdT-coupled reaction and CE assay described in Example 6.

TABLE 21.1
Reaction conditions

Lysis Buffer-TEoA (pH 7.5), 0.1 g/L lysozyme; Lysis Conditions-100 μL, 67° C., 60 min; Reaction
buffer-50 mM Tris, 50 mM LiK(acetylphosphate), 10 μM ATP, 10 mM magnesium chloride, pH 8.0;
Lysate concentration (vol %)-25; Reaction Conditions-1 μL, 30° C., 1 hr; Nucleoside substrate-fG;
Substrate Concentration-10 mM; Auxiliary Cascade Enzymes (AdyK/AcK)-SEQ ID NO: 1154 (10
uM), SEQ ID NO: 1160 (10 uM); Dilution into Coupling Reaction-800×; Substrate
Oligonucleotides-SEQ ID NO: 1163, SEQ ID NO: 1164; Product Oligonucleotide-SEQ ID NO:
1809, SEQ ID NO: 1810.

[0628] Stability relative to SEQ ID NO: 734 (activity FIOP) was calculated based on the percentage of extension products observed for the variant compared with the percentage observed with SEQ ID NO: 734 (where the percent product may be set as the average of replicates or else the highest single sample as appropriate). The results are shown in Table 21.2.

TABLE 21.2
Adenosine kinase activity relative to SEQ ID NO: 734

| SEQ ID | | FIOP Stability 1 |
|---|---|---|
| NO: | Amino Acid Differences | Relative to |
| (nt/aa) | (Relative to SEQ ID NO: 734) | SEQ ID NO: 734 |
| 907/908 | D311Q | ++ |
| 909/910 | R52D | +++ |
| 925/926 | Q83V | + |
| 931/932 | P187V | + |
| 953/954 | G169M | ++ |
| 955/956 | R52G | +++ |
| 967/968 | A167F | +++ |
| 971/972 | H35V | + |
| 975/976 | T211M | +++ |
| 981/982 | V41L | +++ |
| 983/984 | D311S | ++ |
| 997/998 | E191A | + |
| 1001/1002 | T211I | + |
| 1003/1004 | H35S | + |
| 1007/1008 | E164K | ++ |
| 1011/1012 | T211F | + |
| 1013/1014 | T211L | +++ |
| 1019/1020 | D311R | +++ |
| 1023/1024 | D311L | + |
| 1049/1050 | A196S | + |
| 1061/1062 | G73E | ++ |
| 1069/1070 | P51S | +++ |
| 1071/1072 | K103L | +++ |
| 1073/1074 | E191R | ++ |
| 1075/1076 | R101F | ++ |
| 1077/1078 | Q83T | ++ |
| 1079/1080 | R52F | ++ |
| 1081/1082 | E164G | ++ |
| 1083/1084 | Q195M | ++ |
| 1085/1086 | R43K | ++ |
| 1087/1088 | T147S | ++ |
| 1089/1090 | P187Q | ++ |
| 1091/1092 | D311M | ++ |
| 1093/1094 | R40W | ++ |
| 1095/1096 | G169I | ++ |
| 1097/1098 | E242T | ++ |
| 1099/1100 | R101W | ++ |
| 1101/1102 | Q83L | + |
| 1103/1104 | S222M | + |
| 1105/1106 | G170S | + |
| 1107/1108 | D311F | + |
| 1109/1110 | V146I | + |
| 1111/1112 | Q83S | + |
| 1113/1114 | K243R | + |
| 1115/1116 | A74T | + |
| 1117/1118 | D311T | + |
| 1119/1120 | Q218N | + |
| 1121/1122 | A74F | + |
| 1123/1124 | R303V | + |
| 1125/1126 | Q83F | + |
| 1127/1128 | E90V | + |
| 1129/1130 | A74K | + |
| 1131/1132 | R303F | + |
| 1133/1134 | N310A | + |

Levels of increased activity were determined FIOP stability 1 relative to SEQ ID NO: 734 and are defined as follows: “+” >1.38, “++” >3.36, “+++” >12.15.

### Example 22

### Activity Improvements Over SEQ ID NO: 896 in the Conversion of Nucleosides to Nucleotides

### HTP Screening for Improved AdoK Variants

[0629] AdoK of SEQ ID NO: 896 was selected as the parent AdoK enzyme. Libraries of genes were produced from the parent gene using various techniques (e.g., saturation mutagenesis and recombination of previously identified beneficial mutations). The polypeptides encoded by each gene were produced in HTP and prepared as described in Table 22.1.

[0630] Reactions were performed as described in Example 4 using conditions summarized in Table 22.1. Data were collected using the TdT-coupled reaction and CE assay described in Example 6.

TABLE 22.1
Reaction conditions

Lysis Buffer-TEoA (pH 7.5), 0.1 g/L lysozyme; Lysis Conditions-100 μL, 50° C., 60 min; Reaction
buffer-50 mM Tris, 50 mM LiK(acetylphosphate), 10 μM ATP, 10 mM magnesium chloride, pH
8.0; Lysate concentration (vol %)-10; Reaction Conditions-1 μL, 30° C., 1 hr; Nucleoside substrate-
mA; Substrate Concentration-10 mM; Auxiliary Cascade Enzymes (AdyK/AcK)-SEQ ID NO:
1174 (10 uM), SEQ ID NO: 1160 (10 uM); Dilution into Coupling Reaction-800×; Substrate
Oligonucleotides-SEQ ID NO: 1163, SEQ ID NO: 1164; Product Oligonucleotide-SEQ ID NO:
1171, SEQ ID NO: 1172.

[0631] Activity relative to SEQ ID NO: 896 (activity FIOP) was calculated based on the percentage of extension products observed for the variant compared with the percentage observed with SEQ ID NO: 896 (where the percent product may be set as the average of replicates or else the highest single sample as appropriate). The results are shown in Table 22.2.

TABLE 22.2
Adenosine kinase activity relative to SEQ ID NO: 896

| SEQ ID | | FIOP Activity 1 |
|---|---|---|
| NO: | Amino Acid Differences | Relative to |
| (nt/aa) | (Relative to SEQ ID NO: 896) | SEQ ID NO: 896 |
| 1195/1196 | R52D/G169M | ++ |
| 1197/1198 | R52D/R141S/G169M | ++ |
| 1199/1200 | R52G | ++ |
| 1201/1202 | R52G/G169M | + |
| 1203/1204 | R52D | + |
| 1205/1206 | V41L | + |
| 1207/1208 | R52G/R141S/G169M | + |

Levels of increased activity were determined FIOP activity 1 relative to SEQ ID NO: 896 and are defined as follows: “+” >1.67, “++” >1.85.

### Example 23

### Stability Improvements Over SEQ ID NO: 896 in the Conversion of Nucleosides to Nucleotides

### HTP Screening for Improved AdoK Variants

[0632] AdoK of SEQ ID NO: 896 was selected as the parent AdoK enzyme. Libraries of genes were produced from the parent gene using various techniques (e.g., saturation mutagenesis and recombination of previously identified beneficial mutations). The polypeptides encoded by each gene were produced in HTP and prepared as described in Table 23.1.

[0633] Reactions were performed as described in Example 4 using conditions summarized in Table 23.1. Data were collected using the TdT-coupled reaction and CE assay described in Example 6.

TABLE 231
Reaction conditions

Lysis Buffer-TEoA (pH 7.5), 0.1 g/L lysozyme; Lysis Conditions-100 μL, 64° C., 60 min; Reaction
buffer-50 mM Tris, 50 mM LiK(acetylphosphate), 10 μM ATP, 10 mM magnesium chloride, pH
8.0; Lysate concentration (vol %)-25; Reaction Conditions-1 μL, 30° C., 1 hr; Nucleoside substrate-
fG; Substrate Concentration-10 mM; Auxiliary Cascade Enzymes (AdyK/AcK)-SEQ ID NO:
1174 (10 uM), SEQ ID NO: 1160 (10 uM); Dilution into Coupling Reaction-800×; Substrate
Oligonucleotides-SEQ ID NO: 1163, SEQ ID NO: 1164; Product Oligonucleotide-SEQ ID NO:
1809, SEQ ID NO: 1810.

[0634] Stability relative to SEQ ID NO: 896 (activity FIOP) was calculated based on the percentage of extension products observed for the variant compared with the percentage observed with SEQ ID NO: 896 (where the percent product may be set as the average of replicates or else the highest single sample as appropriate). The results are shown in Table 23.2.

TABLE 23.2
Adenosine kinase activity relative to SEQ ID NO: 896

| SEQ ID | | FIOP Stability 1 |
|---|---|---|
| NO: | Amino Acid Differences | Relative to |
| (nt/aa) | (Relative to SEQ ID NO: 896) | SEQ ID NO: 896 |
| 1197/1198 | R52D/R141S/G169M | +++ |
| 1199/1200 | R52G | +++ |
| 1201/1202 | R52G/G169M | + |
| 1207/1208 | R52G/R141S/G169M | +++ |
| 1209/1210 | G169M | ++ |
| 1211/1212 | P51S/R52G/A211M | ++ |
| 1213/1214 | R52G/R141S/P187V | ++ |
| 1215/1216 | P51S/R52D | ++ |
| 1217/1218 | R141S | + |
| 1219/1220 | V41L/K103L | + |
| 1221/1222 | D311Q | + |
| 1223/1224 | A167F | + |
| 1225/1226 | V41L/D311Q | + |
| 1227/1228 | P51S/R52G | + |

Levels of increased activity were determined FIOP stability 1 relative to SEQ ID NO: 896 and are defined as follows: “+” >2.22, “++” >3.74, “+++” >4.33.

### Example 24

### Activity Improvements Over SEQ ID NO: 896 in the Conversion of Nucleosides to Nucleotides

### HTP Screening for Improved AdoK Variants

[0635] AdoK of SEQ ID NO: 896 was selected as the parent AdoK enzyme. Libraries of genes were produced from the parent gene using various techniques (e.g. saturation mutagenesis and recombination of previously identified beneficial mutations). The polypeptides encoded by each gene were produced in HTP and prepared as described in Table 24.1.

[0636] Reactions were peformed as described in Example 4 using conditions summarized in Table 24.1. Data were collected using the TdT-coupled reaction and CE assay described in Example 6.

TABLE 24.1
Reaction conditions

Lysis Buffer-TEoA (pH 7.5), 0.1 g/L lysozyme; Lysis Conditions-100 μL, 50° C., 60 min; Reaction
buffer-50 mM Tris, 50 mM LiK(acetylphosphate), 10 μM ATP, 10 mM magnesium chloride, pH
8.0; Lysate concentration (vol %)-10; Reaction Conditions-1 μL, 30° C., 1 hr; Nucleoside substrate-
mA; Substrate Concentration-10 mM; Auxiliary Cascade Enzymes (AdyK/AcK)-SEQ ID NO:
1174 (10 uM), SEQ ID NO: 1160 (10 uM); Dilution into Coupling Reaction-800×; Substrate
Oligonucleotides-SEQ ID NO: 1163, SEQ ID NO: 1164; Product Oligonucleotide-SEQ ID NO:
1171, SEQ ID NO: 1172.

[0637] Activity relative to SEQ ID NO: 896 (activity FIOP) was calculated based on the percentage of extension products observed for the variant compared with the percentage observed with SEQ ID NO: 896 (where the percent product may be set as the average of replicates or else the highest single sample as appropriate). The results are shown in Table 24.2.

TABLE 24.2
Adenosine kinase activity relative to SEQ ID NO: 896

| SEQ ID | | FIOP Activity 1 |
|---|---|---|
| NO: | Amino Acid Differences | Relative to |
| (nt/aa) | (Relative to SEQ ID NO: 896) | SEQ ID NO: 896 |
| 1229/1230 | M133L | ++ |
| 1231/1232 | N207R | ++ |
| 1233/1234 | A14V | ++ |
| 1235/1236 | N34R | + |
| 1237/1238 | P241R | + |
| 1239/1240 | K33Q | + |

Levels of increased activity were determined FIOP activity 1 relative to SEQ ID NO: 896 and are defined as follows: “+” >1.29, “++” >1.5.

### Example 25

### Stability Improvements Over SEQ ID NO: 896 in the Conversion of Nucleosides to Nucleotides

### HTP Screening for Improved AdoK Variants

[0638] AdoK of SEQ ID NO: 896 was selected as the parent AdoK enzyme. Libraries of genes were produced from the parent gene using various techniques (e.g., saturation mutagenesis and recombination of previously identified beneficial mutations). The polypeptides encoded by each gene were produced in HTP and prepared as described in Table 25.1.

[0639] Reactions were performed as described in Example 4 using conditions summarized in Table 25.1. Data were collected using the TdT-coupled reaction and CE assay described in Example 6.

TABLE 25.1
Reaction conditions

Lysis Buffer-TEoA (pH 7.5), 0.1 g/L lysozyme; Lysis Conditions-100 μL, 64° C., 60 min; Reaction
buffer-50 mM Tris, 50 mM LiK(acetylphosphate), 10 μM ATP, 10 mM magnesium chloride, pH
8.0; Lysate concentration (vol %)-25; Reaction Conditions-1 μL, 30° C., 1 hr; Nucleoside substrate-
fG; Substrate Concentration-10 mM; Auxiliary Cascade Enzymes (AdyK/AcK)-SEQ ID NO:
1174 (10 uM), SEQ ID NO: 1160 (10 uM); Dilution into Coupling Reaction-800×; Substrate
Oligonucleotides-SEQ ID NO: 1163, SEQ ID NO: 1164; Product Oligonucleotide-SEQ ID NO:
1809, SEQ ID NO: 1810.

[0640] Stability relative to SEQ ID NO: 896 (activity FIOP) was calculated based on the percentage of extension products observed for the variant compared with the percentage observed with SEQ ID NO: 896 (where the percent product may be set as the average of replicates or else the highest single sample as appropriate). The results are shown in Table 25.2.

TABLE 25.2
Adenosine kinase activity relative to SEQ ID NO: 896

| SEQ ID | | FIOP Stability 1 |
|---|---|---|
| NO: | Amino Acid Differences | Relative to |
| (nt/aa) | (Relative to SEQ ID NO: 896) | SEQ ID NO: 896 |
| 1229/1230 | M133L | +++ |
| 1231/1232 | N207R | ++ |
| 1237/1238 | P241R | ++ |
| 1241/1242 | V27S | +++ |
| 1243/1244 | S206A | +++ |
| 1245/1246 | E217V | +++ |
| 1247/1248 | H239R | ++ |
| 1249/1250 | N207T | ++ |
| 1251/1252 | S13A | ++ |
| 1253/1254 | D246T | + |
| 1255/1256 | S13P | + |
| 1257/1258 | N207M | + |
| 1259/1260 | N162F | + |
| 1261/1262 | N207L | + |
| 1263/1264 | V27P | + |
| 1265/1266 | L108C | + |
| 1267/1268 | I160L | + |
| 1269/1270 | K33S | + |

Levels of increased activity were determined FIOP stability 1 relative to SEQ ID NO: 896 and are defined as follows: “+” >1.63, “++” >3.0, “+++” >4.22.

### Example 26

### Activity Improvements Over SEQ ID NO: 896 in the Conversion of Nucleosides to Nucleotides

### HTP Screening for Improved AdoK Variants

[0641] AdoK of SEQ ID NO: 896 was selected as the parent AdoK enzyme. Libraries of genes were produced from the parent gene using various techniques (e.g., saturation mutagenesis and recombination of previously identified beneficial mutations). The polypeptides encoded by each gene were produced in HTP and prepared as described in Table 26.1.

[0642] Reactions were performed as described in Example 4 using conditions summarized in Table 26.1. Data were collected using the HPLC assay described in Example 5.

TABLE 26.1
Reaction conditions

Lysis Buffer-TEoA (pH 7.5), 0.1 g/L lysozyme; Lysis Conditions-100 μL, 50° C., 60 min; Reaction
buffer-50 mM Tris, 50 mM LiK(acetylphosphate), 10 μM ATP, 10 mM magnesium chloride, pH
8.0; Lysate concentration (vol %)-5; Reaction Conditions-5 μL, 600 rpm, 30° C., 1 hr; Nucleoside
substrate-fU; Substrate Concentration-10 mM; Auxiliary Cascade Enzymes (AdyK/AcK)-SEQ
ID NO: 1174 (10 uM), SEQ ID NO: 1160 (10 uM)

[0643] Activity relative to SEQ ID NO: 896 (activity FIOP) was calculated based on the percentage of extension products observed for the variant compared with the percentage observed with SEQ ID NO: 896 (where the percent product may be set as the average of replicates or else the highest single sample as appropriate). The results are shown in Table 26.2.

TABLE 26.2
Adenosine kinase activity relative to SEQ ID NO: 896

| SEQ ID | | FIOP Activity 1 |
|---|---|---|
| NO: | Amino Acid Differences | Relative to |
| (nt/aa) | (Relative to SEQ ID NO: 896) | SEQ ID NO: 896 |
| 1245/1246 | E217V | + |
| 1257/1258 | N207M | ++ |
| 1271/1272 | Y245W | ++ |
| 1273/1274 | H239F | ++ |
| 1275/1276 | F92M | + |
| 1277/1278 | A163G | + |
| 1279/1280 | H239T | + |

Levels of increased activity were determined FIOP activity 1 relative to SEQ ID NO: 896 and are defined as follows: “+” >1.04, “++” >1.2.

### Example 27

### Activity Improvements Over SEQ ID NO: 896 in the Conversion of Nucleosides to Nucleotides

### HTP Screening for Improved AdoK Variants

[0644] AdoK of SEQ ID NO: 896 was selected as the parent AdoK enzyme. Libraries of genes were produced from the parent gene using various techniques (e.g. saturation mutagenesis and recombination of previously identified beneficial mutations). The polypeptides encoded by each gene were produced in HTP and prepared as described in Table 27.1.

[0645] Reactions were performed as described in Example 4 using conditions summarized in Table 27.1. Data were collected using the TdT-coupled reaction and CE assay described in Example 6.

TABLE 27.1
Reaction conditions

Lysis Buffer-TEoA (pH 7.5), 0.1 g/L lysozyme; Lysis Conditions-100 μL, 50° C., 60 min; Reaction
buffer-50 mM Tris, 50 mM LiK(acetylphosphate), 10 μM ATP, 10 mM magnesium chloride, pH
8.0; Lysate concentration (vol %)-25; Reaction Conditions-1 μL, 30° C., 1 hr; Nucleoside substrate-
mC; Substrate Concentration-10 mM; Auxiliary Cascade Enzymes (AdyK/AcK)-SEQ ID NO:
1176 (10 μM), SEQ ID NO: 1190 (10 μM); Dilution into Coupling Reaction-80×; Substrate
Oligonucleotides-SEQ ID NO: 1163, SEQ ID NO: 1164; Product Oligonucleotides-SEQ ID NO:
1811, SEQ ID NO: 1812.

[0646] Activity relative to SEQ ID NO: 896 (activity FIOP) was calculated based on the percentage of extension products observed for the variant compared with the percentage observed with SEQ ID NO: 896 (where the percent product may be set as the average of replicates or else the highest single sample as appropriate). The results are shown in Table 27.2.

TABLE 27.2
Adenosine kinase activity relative to SEQ ID NO: 896

| | | FIOP Activity 1 |
|---|---|---|
| SEQ ID NO: | Amino Acid Differences | Relative to |
| (nt/aa) | (Relative to SEQ ID NO: 896) | SEQ ID NO: 896 |
| 1229/1230 | M133L | + |
| 1235/1236 | N34R | ++ |
| 1241/1242 | V27S | + |
| 1245/1246 | E217V | + |
| 1255/1256 | S13P | + |
| 1263/1264 | V27P | + |
| 1281/1282 | I104C | +++ |
| 1283/1284 | E157P | +++ |
| 1285/1286 | W215L | +++ |
| 1287/1288 | T80V | +++ |
| 1289/1290 | R54V | +++ |
| 1291/1292 | H239A | +++ |
| 1293/1294 | S13E | +++ |
| 1295/1296 | N207V | +++ |
| 1297/1298 | T240V | ++ |
| 1299/1300 | M133A | ++ |
| 1301/1302 | Q210L | ++ |
| 1303/1304 | N207A | ++ |
| 1305/1306 | D23N | ++ |
| 1307/1308 | M53R | ++ |
| 1309/1310 | P87K | ++ |
| 1311/1312 | E188T | ++ |
| 1313/1314 | V151L | + |
| 1315/1316 | P29R | + |
| 1317/1318 | P258S | + |
| 1319/1320 | N34G | + |
| 1321/1322 | V238L | + |
| 1323/1324 | V27R | + |
| 1325/1326 | A14S | + |
| 1327/1328 | T244W | + |
| 1329/1330 | F192L | + |
| 1331/1332 | H91Y | + |
| 1333/1334 | S206H | + |
| 1335/1336 | D30Y | + |
| 1337/1338 | T80S | + |
| 1339/1340 | P258R | + |
| 1341/1342 | T240L | + |
| 1343/1344 | I104L | + |

Levels of increased activity were determined FIOP activity 1 relative to SEQ ID NO: 896 and are defined as follows: “+” > 1.07, “++” > 1.22, “+++” > 1.33.

### Example 28

### Activity Improvements Over SEQ ID NO: 1196 in the Conversion of Nucleosides to Nucleotides

### HTP Screening for Improved AdoK Variants

[0647] AdoK of SEQ ID NO: 1196 was selected as the parent AdoK enzyme. Libraries of genes were produced from the parent gene using various techniques (e.g. saturation mutagenesis and recombination of previously identified beneficial mutations). The polypeptides encoded by each gene were produced in HTP and prepared as described in Table 28.1.

[0648] Reactions were performed as described in Example 4 using conditions summarized in Table 28.1. Data were collected using the TdT-coupled reaction and CE assay described in Example 6.

TABLE 28.1
Reaction conditions

Lysis Buffer - TEoA (pH 7.5), 0.1 g/L lysozyme; Lysis Conditions - 100 μL, 50° C., 60 min; Reaction
buffer - 50 mM Tris, 50 mM LiK(acetylphosphate), 10 μM ATP, 10 mM magnesium chloride, pH
8.0; Lysate concentration (vol %) - 5; Reaction Conditions - 1 μL, 30° C., 1 hr; Nucleoside substrate -
mA; Substrate Concentration - 10 mM; Auxiliary Cascade Enzymes (AdyK/AcK) - SEQ ID NO:
1174 (10 μM), SEQ ID NO: 1160 (10 μM); Dilution into Coupling Reaction - 800X; Substrate
Oligonucleotides - SEQ ID NO: 1163, SEQ ID NO: 1164; Product Oligonucleotides - SEQ ID NO:
1171, SEQ ID NO: 1172.

[0649] Activity relative to SEQ ID NO: 1196 (activity FIOP) was calculated based on the percentage of extension products observed for the variant compared with the percentage observed with SEQ ID NO: 1196 (where the percent product may be set as the average of replicates or else the highest single sample as appropriate). The results are shown in Table 28.2.

TABLE 28.2
Adenosine kinase activity relative to SEQ ID NO: 1196

| | | FIOP Activity 1 |
|---|---|---|
| SEQ ID NO: | Amino Acid Differences | Relative to |
| (nt/aa) | (Relative to SEQ ID NO: 1196) | SEQ ID NO: 1196 |
| 1345/1346 | T24V | ++ |
| 1347/1348 | T24I | ++ |
| 1349/1350 | A234K/A236C | ++ |
| 1351/1352 | T24N | ++ |
| 1353/1354 | K251H/T252A | ++ |
| 1355/1356 | M119S | + |
| 1357/1358 | M119T | + |
| 1359/1360 | A234K | + |
| 1361/1362 | A234K/A236S | + |
| 1363/1364 | Q231L/A234K | + |

Levels of increased activity were determined FIOP activity 1 relative to SEQ ID NO: 1196 and are defined as follows: “+” > 1.77, “++” > 2.29.

### Example 29

### Activity Improvements Over SEQ ID NO: 1352 in the Conversion of Nucleosides to Nucleotides

### HTP Screening for Improved AdoK Variants

[0650] AdoK of SEQ ID NO: 1352 was recloned into the pJV11900 (U.S. Ser. No. 10/844,358B2, SEQ ID NO: 1007) vector to yield SEQ ID NO: 1366, which was selected as the parent AdoK enzyme. Libraries of genes were produced from the parent gene using various techniques (e.g. saturation mutagenesis and recombination of previously identified beneficial mutations). The polypeptides encoded by each gene were produced in HTP and prepared as described in Table 29.1.

[0651] Reactions were performed as described in Example 4 using conditions summarized in Table 29.1. Data were collected using the TdT-coupled reaction and CE assay described in Example 6.

TABLE 29.1
Reaction Conditions

Lysis Buffer - TEoA (pH 7.5), 0.1 g/L lysozyme; Lysis Conditions - 100 μL, 50° C., 60 min; Reaction
buffer - 50 mM Tris, 50 mM LiK(acetylphosphate), 10 μM ATP, 10 mM magnesium chloride, pH
8.0; Lysate concentration (vol %) - 25; Reaction Conditions - 1 μL, 30° C., 1 hr; Nucleoside substrate -
mC; Substrate Concentration - 10 mM; Auxiliary Cascade Enzymes (AdyK/AcK) - SEQ ID NO:
1176 (10 μM), SEQ ID NO: 1190 (10 μM); Dilution into Coupling Reaction - 80X; Substrate
Oligonucleotides - SEQ ID NO: 1163, SEQ ID NO: 1164; Product Oligonucleotides - SEQ ID NO:
1811, SEQ ID NO: 1812.

[0652] Activity relative to SEQ ID NO: 1366 (activity FIOP) was calculated based on the percentage of extension products observed for the variant compared with the percentage observed with SEQ ID NO: 1366 (where the percent product may be set as the average of replicates or else the highest single sample as appropriate). The results are shown in Table 29.2.

TABLE 29.2
Adenosine kinase activity relative to SEQ ID NO: 1366

| | | FIOP Activity 1 |
|---|---|---|
| SEQ ID NO: | Amino Acid Differences | Relative to |
| (nt/aa) | (Relative to SEQ ID NO: 1366) | SEQ ID NO: 1366 |
| 1367/1368 | P182G | ++ |
| 1369/1370 | H121Q | ++ |
| 1371/1372 | P249A | + |
| 1373/1374 | G129S | + |
| 1375/1376 | G152A | + |
| 1377/1378 | L237V | + |
| 1379/1380 | G155A | + |

Levels of increased activity were determined FIOP activity 1 relative to SEQ ID NO: 1366 and are defined as follows: “+” > 1.12, “++” > 1.39.

### Example 30

### Activity Improvements Over SEQ ID NO: 1366 in the Conversion of Nucleosides to Nucleotides

### HTP Screening for Improved AdoK Variants

[0653] AdoK of SEQ ID NO: 1366 was selected as the parent AdoK enzyme. Libraries of genes were produced from the parent gene using various techniques (e.g. saturation mutagenesis and recombination of previously identified beneficial mutations). The polypeptides encoded by each gene were produced in HTP and prepared as described in Table 30.1.

[0654] Reactions were performed as described in Example 4 using conditions summarized in Table 30.1. Data were collected using the TdT-coupled reaction and CE assay described in Example 6.

TABLE 30.1
Reaction conditions

Lysis Buffer - TEoA (pH 7.5), 0.1 g/L lysozyme; Lysis Conditions - 100 μL, 50° C., 60 min; Reaction
buffer - 50 mM Tris, 50 mM LiK(acetylphosphate), 10 μM ATP, 10 mM magnesium chloride, pH
8.0; Lysate concentration (vol %) - 25; Reaction Conditions - 1 μL, 30° C., 3 hr; Nucleoside substrate -
mC; Substrate Concentration - 10 mM; Auxiliary Cascade Enzymes (AdyK/AcK) - SEQ ID NO:
1178 (10 μM), SEQ ID NO: 1190 (10 μM); Dilution into Coupling Reaction - 80X; Substrate
Oligonucleotides - SEQ ID NO: 1163, SEQ ID NO: 1164; Product Oligonucleotides - SEQ ID NO:
1811, SEQ ID NO: 1812.

[0655] Activity relative to SEQ ID NO: 1366 (activity FIOP) was calculated based on the percentage of extension products observed for the variant compared with the percentage observed with SEQ ID NO: 1366 (where the percent product may be set as the average of replicates or else the highest single sample as appropriate). The results are shown in Table 30.2.

TABLE 30.2
Adenosine kinase activity relative to SEQ ID NO: 1366

| | | FIOP Activity 1 |
|---|---|---|
| SEQ ID NO: | Amino Acid Differences | Relative to |
| (nt/aa) | (Relative to SEQ ID NO: 1366) | SEQ ID NO: 1366 |
| 1381/1382 | H121Q/G129S/N207R/L237V/P249A | +++ |
| 1383/1384 | H121Q/G129S/N207R/P249A | +++ |
| 1385/1386 | V27P/H121Q/N207R | +++ |
| 1387/1388 | V27P/H121Q/N207R/P249A | ++ |
| 1389/1390 | H121Q/N207R | ++ |
| 1391/1392 | H121Q/L237V | ++ |
| 1393/1394 | H121Q/P249A | ++ |
| 1395/1396 | H121Q/N207R/T252V | + |
| 1397/1398 | V27P/H121Q/G129S/N207R | + |
| 1399/1400 | V27P/H121Q/G129S/L237V | + |
| 1401/1402 | N207R | + |
| 1403/1404 | P182G/N207R | + |
| 1405/1406 | H121Q/G129S | + |
| 1407/1408 | H121Q/L237V/T252V | + |
| 1409/1410 | G155I | + |

Levels of increased activity were determined FIOP activity 1 relative to SEQ ID NO: 1366 and are defined as follows: “+” > 1.87, “++” > 3.21, “+++” > 3.98.

### Example 31

### Activity Improvements Over SEQ ID NO: 1382 in the Conversion of Nucleosides to Nucleotides

### HTP Screening for Improved AdoK Variants

[0656] AdoK of SEQ ID NO: 1382 was selected as the parent AdoK enzyme. Libraries of genes were produced from the parent gene using various techniques (e.g. saturation mutagenesis and recombination of previously identified beneficial mutations). The polypeptides encoded by each gene were produced in HTP and prepared as described in Table 31.1.

[0657] Reactions were peformed as described in Example 4 using conditions summarized in Table 31.1. Data were collected using the TdT-coupled reaction and CE assay described in Example 6.

TABLE 31.1
Reaction Conditions

Lysis Buffer - TEoA (pH 7.5), 0.1 g/L lysozyme; Lysis Conditions - 100 μL, 50° C., 60 min; Reaction
buffer - 50 mM Tris, 50 mM LiK(acetylphosphate), 10 μM ATP, 10 mM magnesium chloride, pH
8.0; Lysate concentration (vol %) - 25; Reaction Conditions - 1 μL, 30° C., 1 hr; Nucleoside substrate -
mC; Substrate Concentration - 10 mM; Auxiliary Cascade Enzymes (AdyK/AcK) - SEQ ID NO:
1178 (10 μM), SEQ ID NO: 1190 (10 μM); Dilution into Coupling Reaction - 800X; Substrate
Oligonucleotides - SEQ ID NO: 1163, SEQ ID NO: 1164; Product Oligonucleotides - SEQ ID NO:
1811, SEQ ID NO: 1812.

[0658] Activity relative to SEQ ID NO: 1382 (activity FIOP) was calculated based on the percentage of extension products observed for the variant compared with the percentage observed with SEQ ID NO: 1382 (where the percent product may be set as the average of replicates or else the highest single sample as appropriate). The results are shown in Table 31.2.

TABLE 31.2
Adenosine kinase activity relative to SEQ ID NO: 1382

| | | FIOP Activity 1 |
|---|---|---|
| SEQ ID NO: | Amino Acid Differences | Relative to |
| (nt/aa) | (Relative to SEQ ID NO: 1382) | SEQ ID NO: 1382 |
| 1411/1412 | K314S | +++ |
| 1413/1414 | V221A | +++ |
| 1415/1416 | G170K | +++ |
| 1417/1418 | R40H | +++ |
| 1419/1420 | K314V | +++ |
| 1421/1422 | L49M | +++ |
| 1423/1424 | G73C | ++ |
| 1425/1426 | K314Q | ++ |
| 1427/1428 | E194A | ++ |
| 1429/1430 | Q195V | ++ |
| 1431/1432 | T147N | ++ |
| 1433/1434 | Q218L | ++ |
| 1435/1436 | N216V | ++ |
| 1437/1438 | E90S | + |
| 1439/1440 | R89L | + |
| 1441/1442 | H42D | + |
| 1443/1444 | A211H | + |
| 1445/1446 | E90T | + |
| 1447/1448 | D106M | + |
| 1449/1450 | I171C | + |
| 1451/1452 | E93A | + |
| 1453/1454 | H296N | + |
| 1455/1456 | S100G | + |
| 1457/1458 | K243Y | + |
| 1459/1460 | P172S | + |
| 1461/1462 | G73A | + |

Levels of increased activity were determined FIOP activity 1 relative to SEQ ID NO: 1382 and are defined as follows: “+” > 1.24, “++” > 1.37, “+++” > 1.6.

### Example 32

### Activity Improvements Over SEQ ID NO: 1382 in the Conversion of Nucleosides to Nucleotides

### HTP Screening for Improved AdoK Variants

[0659] AdoK of SEQ ID NO: 1382 was selected as the parent AdoK enzyme. Libraries of genes were produced from the parent gene using various techniques (e.g. saturation mutagenesis and recombination of previously identified beneficial mutations). The polypeptides encoded by each gene were produced in HTP and prepared as described in Table 32.1.

[0660] Reactions were performed as described in Example 4 using conditions summarized in Table 32.1. Data were collected using the TdT-coupled reaction and CE assay described in Example 6.

TABLE 32.1
Reaction Conditions

Lysis Buffer - TEoA (pH 7.5), 0.1 g/L lysozyme; Lysis Conditions - 100 μL, 50° C., 60 min; Reaction
buffer - 50 mM Tris, 50 mM LiK(acetylphosphate), 10 μM ATP, 10 mM magnesium chloride, pH
8.0; Lysate concentration (vol %) - 25; Reaction Conditions - 1 μL, 30° C., 1 hr; Nucleoside substrate -
mG; Substrate Concentration - 10 mM; Auxiliary Cascade Enzymes (AdyK/AcK) - SEQ ID NO:
1178 (10 μM), SEQ ID NO: 1190 (10 μM); Dilution into Coupling Reaction - 800X; Substrate
Oligonucleotides - SEQ ID NO: 1163, SEQ ID NO: 1164; Product Oligonucleotides - SEQ ID NO:
1815, SEQ ID NO: 1816.

[0661] Activity relative to SEQ ID NO: 1382 (activity FIOP) was calculated based on the percentage of extension products observed for the variant compared with the percentage observed with SEQ ID NO: 1382 (where the percent product may be set as the average of replicates or else the highest single sample as appropriate). The results are shown in Table 32.2.

TABLE 32.2
Adenosine kinase activity relative to SEQ ID NO: 1382

| | | FIOP | FIOP | FIOP |
|---|---|---|---|---|
| | | activity 1 | activity 2 | activity 3 |
| SEQ ID NO: | Amino Acid Differences | relative to | relative to | relative to |
| (nt/aa) | (Relative to SEQ ID NO: 1382) | SEQ ID NO: 1382 | SEQ ID NO: 1382 | SEQ ID NO: 1382 |
| 1463/1464 | P51F | +++ | ++ | +++ |
| 1465/1466 | Y271W | +++ | + | + |
| 1467/1468 | E90S/I171V/E191W | ++ | | + |
| 1469/1470 | E90S/Y271W | ++ | + | + |
| 1471/1472 | E90S/E191W | ++ | ++ | |
| 1473/1474 | E90S/T147A/I171V/Y271W | ++ | | |
| 1475/1476 | E191W | ++ | | |
| 1477/1478 | P51F/E90S | + | | + |
| 1479/1480 | P187H/A211W | + | + | + |
| 1481/1482 | I171C/E191W | + | | + |
| 1483/1484 | G170M/A211K | + | ++ | + |
| 1485/1486 | L49M/P51G | + | + | ++ |
| 1487/1488 | P51G/I171C/E191W/Y271W | + | + | ++ |
| 1489/1490 | R40M/A211K | + | + | + |
| 1491/1492 | D106T/P187H/A211K | + | + | |
| 1493/1494 | A211W/V221A | + | + | ++ |
| 1495/1496 | R40M/G170M/A211K | + | + | |
| 1497/1498 | A211W | + | + | + |
| 1499/1500 | L49M/P51G/E90S/T147A/I171V | | +++ | +++ |
| 1501/1502 | P51G/E90S/I171V | | +++ | +++ |
| 1503/1504 | P51G/I171V | | +++ | +++ |
| 1505/1506 | L49M/P51F/E191W | | +++ | + |
| 1507/1508 | L49M/P51G/E90S/T147A | | ++ | + |
| 1509/1510 | P51G | | ++ | ++ |
| 1511/1512 | L49M/P51F/I171V/Y271W | | ++ | |
| 1513/1514 | L49M/P51F/I171C/Y271W | | ++ | |
| 1515/1516 | D106T/A211K/V221A | | + | + |
| 1517/1518 | A211K | | + | + |
| 1519/1520 | P187H/V221A | | + | ++ |
| 1521/1522 | L49M/I171C/E191W/K314S | | + | |
| 1523/1524 | P51G/E191W/Y271W | | + | + |
| 1525/1526 | P51G/E90S/I171C/E191W/Y271W | | + | +++ |
| 1527/1528 | D52T/V221A | | + | |
| 1529/1530 | E90S/I171C/E191W/Y271W | | + | + |
| 1531/1532 | E191W/Y271W | | | + |
| 1533/1534 | G170M/V221A | | | + |

Levels of increased activity were determined for FIOP activity 1 relative to SEQ ID NO: 1382 and are defined as follows: “+” > 1.1, “++” > 1.5, “+++” > 1.8. Levels of increased activity were determined for FIOP activity 2 relative to SEQ ID NO: 1382 and are defined as follows: “+” > 1.1, “++” > 1.5, “+++” > 2.0. Levels of increased activity were determined for FIOP activity 3 relative to SEQ ID NO: 1382 and are defined as follows: “+” > 1.1, “++” > 1.3, “+++” > 1.7.

### Example 33

### Stability Improvements Over SEQ ID NO: 1382 in the Conversion of Nucleosides to Nucleotides

### HTP Screening for Improved AdoK Variants

[0662] AdoK of SEQ ID NO: 1382 was selected as the parent AdoK enzyme. Libraries of genes were produced from the parent gene using various techniques (e.g. saturation mutagenesis and recombination of previously identified beneficial mutations). The polypeptides encoded by each gene were produced in HTP and prepared as described in Table 33.1.

[0663] Reactions were performed as described in Example 4 using conditions summarized in Table 33.1. Data were collected using the TdT-coupled reaction and CE assay described in Example 6.

TABLE 33.1
Reaction Conditions

Lysis Buffer - TEoA (pH 7.5), 0.1 g/L lysozyme; Lysis Conditions - 100 μL, 60° C., 60 min; Reaction
buffer - 50 mM Tris, 50 mM LiK(acetylphosphate), 10 μM ATP, 10 mM magnesium chloride, pH
8.0; Lysate concentration (vol %) - 5; Reaction Conditions - 1 μL, 30° C., 1 hr; Nucleoside substrate -
fG; Substrate Concentration - 10 mM; Auxiliary Cascade Enzymes (AdyK/AcK) - SEQ ID NO: 1178
(10 μM), SEQ ID NO: 1190 (10 μM); Dilution into Coupling Reaction - 800X; Substrate
Oligonucleotides - SEQ ID NO: 1163, SEQ ID NO: 1164; Product Oligonucleotides - SEQ ID NO:
1809, SEQ ID NO: 1810.

[0664] Stability relative to SEQ ID NO: 1382 (activity FIOP) was calculated based on the percentage of extension products observed for the variant compared with the percentage observed with SEQ ID NO: 1382 (where the percent product may be set as the average of replicates or else the highest single sample as appropriate). The results are shown in Table 33.2.

TABLE 33.2
Adenosine kinase activity relative to SEQ ID NO: 1382

| | | FIOP Stability 1 |
|---|---|---|
| SEQ ID NO: | Amino Acid Differences | Relative to |
| (nt/aa) | (Relative to SEQ ID NO: 1382) | SEQ ID NO: 1382 |
| 1463/1464 | P51F | +++ |
| 1477/1478 | P51F/E90S | + |
| 1479/1480 | P187H/A211W | + |
| 1485/1486 | L49M/P51G | + |
| 1487/1488 | P51G/I171C/E191W/Y271W | + |
| 1489/1490 | R40M/A211K | + |
| 1493/1494 | A211W/V221A | + |
| 1495/1496 | R40M/G170M/A211K | ++ |
| 1499/1500 | L49M/P51G/E90S/T147A/I171V | + |
| 1501/1502 | P51G/E90S/I171V | +++ |
| 1503/1504 | P51G/I171V | ++ |
| 1505/1506 | L49M/P51F/E191W | +++ |
| 1507/1508 | L49M/P51G/E90S/T147A | + |
| 1511/1512 | L49M/P51F/I171V/Y271W | +++ |
| 1513/1514 | L49M/P51F/I171C/Y271W | ++ |
| 1525/1526 | P51G/E90S/I171C/E191W/Y271W | + |
| 1535/1536 | V50C/D52T | +++ |
| 1537/1538 | V50C/D52T/D106T/A211W | ++ |
| 1539/1540 | V50C/A211K/E308D | ++ |
| 1541/1542 | V50C/D52S/D106T | ++ |
| 1543/1544 | R40M | ++ |
| 1545/1546 | R40M/V50C/P187H/A211K/E308D | + |
| 1547/1548 | V50C/D52T/D106T/G170M/ | + |
| | P187H/E308D | |
| 1549/1550 | R40M/D52T/G170M | + |
| 1551/1552 | V50C/D106T | + |
| 1553/1554 | V50C/V221A/E308D | + |
| 1555/1556 | L49M/P51F/E90S/Y271W | + |
| 1557/1558 | R40M/D52S/G170M/A211W | + |
| 1559/1560 | P187H | + |
| 1561/1562 | V50C/A211K/V221A/E308D | + |
| 1563/1564 | R40M/V50C/D52S/V221A | + |

Levels of increased activity were determined FIOP stability 1 relative to SEQ ID NO: 1382 and are defined as follows: “+” > 1.84, “++” > 2.6, “+++” > 3.09.

### Example 34

### Activity Improvements Over SEQ ID NO: 1464 in the Conversion of Nucleosides to Nucleotides

### HTP Screening for Improved AdoK Variants

[0665] AdoK of SEQ ID NO: 1464 was selected as the parent AdoK enzyme. Libraries of genes were produced from the parent gene using various techniques (e.g. saturation mutagenesis and recombination of previously identified beneficial mutations). The polypeptides encoded by each gene were produced in HTP and prepared as described in Table 34.1.

[0666] Reactions were performed as described in Example 4 using conditions summarized in Table 34.1. Data were collected using the TdT-coupled reaction and CE assay described in Example 6.

TABLE 34.1
Reaction Conditions

Lysis Buffer - TEoA (pH 7.5), 0.1 g/L lysozyme; Lysis Conditions - 100 μL, 50° C., 60 min; Reaction
buffer - 50 mM Tris, 50 mM LiK(acetylphosphate), 10 μM ATP, 10 mM magnesium chloride, pH
8.0; Lysate concentration (vol %) - 25; Reaction Conditions - 1 μL, 30° C., 1 hr; Nucleoside substrate -
mU; Substrate Concentration - 10 mM; Auxiliary Cascade Enzymes (AdyK/AcK) - SEQ ID NO:
1180 (10 μM), SEQ ID NO: 1190 (10 μM); Dilution into Coupling Reaction - 800X; Substrate
Oligonucleotides - SEQ ID NO: 1163, SEQ ID NO: 1164; Product Oligonucleotides - SEQ ID NO:
1813, SEQ ID NO: 1814.

[0667] Activity relative to SEQ ID NO: 1464 (activity FIOP) was calculated based on the percentage of extension products observed for the variant compared with the percentage observed with SEQ ID NO: 1464 (where the percent product may be set as the average of replicates or else the highest single sample as appropriate). The results are shown in Table 34.2.

TABLE 34.2
Adenosine kinase activity relative to SEQ ID NO: 1464

| | | FIOP Activity 1 |
|---|---|---|
| SEQ ID NO: | Amino Acid Differences | Relative to |
| (nt/aa) | (Relative to SEQ ID NO: 1464) | SEQ ID NO: 1464 |
| 1565/1566 | F317M | ++ |
| 1567/1568 | A113G | ++ |
| 1569/1570 | A21G | ++ |
| 1571/1572 | G155V | + |
| 1573/1574 | A126S | + |
| 1575/1576 | G155N | + |
| 1577/1578 | Q231M | + |

Levels of increased activity were determined FIOP activity 1 relative to SEQ ID NO: 1464 and are defined as follows: “+” > 1.51, “++” > 2.75.

### Example 35

### Activity Improvements Over SEQ ID NO: 1568 in the Conversion of Nucleosides to Nucleotides

### HTP Screening for Improved AdoK Variants

[0668] AdoK of SEQ ID NO: 1568 was selected as the parent AdoK enzyme. Libraries of genes were produced from the parent gene using various techniques (e.g. saturation mutagenesis and recombination of previously identified beneficial mutations). The polypeptides encoded by each gene were produced in HTP and prepared as described in Table 35.1.

[0669] Reactions were performed as described in Example 4 using conditions summarized in Table 35.1. Data were collected using the TdT-coupled reaction and CE assay described in Example 6.

TABLE 35.1
Reaction Conditions

Lysis Buffer - TEoA (pH 7.5), 0.1 g/L lysozyme; Lysis Conditions - 100 μL, 50° C., 60 min; Reaction
buffer - 50 mM Tris, 50 mM LiK(acetylphosphate), 10 μM ATP, 10 mM magnesium chloride, pH
8.0; Lysate concentration (vol %) - 10; Reaction Conditions - 1 μL, 30° C., 1 hr; Nucleoside substrate -
mU; Substrate Concentration - 10 mM; Auxiliary Cascade Enzymes (AdyK/AcK) - SEQ ID NO:
1182 (10 μM), SEQ ID NO: 1190 (10 μM); Dilution into Coupling Reaction - 800X; Substrate
Oligonucleotides - SEQ ID NO: 1163, SEQ ID NO: 1164; Product Oligonucleotides - SEQ ID NO:
1813, SEQ ID NO: 1814.

[0670] Activity relative to SEQ ID NO: 1568 (activity FIOP) was calculated based on the percentage of extension products observed for the variant compared with the percentage observed with SEQ ID NO: 1568 (where the percent product may be set as the average of replicates or else the highest single sample as appropriate). The results are shown in Table 35.2.

TABLE 35.2
Adenosine kinase activity relative to SEQ ID NO: 1568

| SEQ ID | | FIOP activity 1 |
|---|---|---|
| NO: | Amino Acid Differences | relative to |
| (nt/aa) | (Relative to SEQ ID NO: 1568) | SEQ ID NO: 1568 |
| 1579/1580 | D246V | ++ |
| 1581/1582 | A74R | ++ |
| 1583/1584 | N185T | ++ |
| 1585/1586 | T244R | + |
| 1587/1588 | D246R | + |
| 1589/1590 | E164S | + |
| 1591/1592 | N276G | + |

Levels of increased activity were determined FIOP activity 1 relative to SEQ ID NO: 1568 and are defined as follows: “+” >1.78, “++” >2.16.

### Example 36

### Activity Improvements Over SEQ ID NO: 1568 in the Conversion of Nucleosides to Nucleotides

### HTP Screening for Improved AdoK Variants

[0671] AdoK of SEQ ID NO: 1568 was selected as the parent AdoK enzyme. Libraries of genes were produced from the parent gene using various techniques (e.g., saturation mutagenesis and recombination of previously identified beneficial mutations). The polypeptides encoded by each gene were produced in HTP and prepared as described in Table 36.1.

[0672] Reactions were performed as described in Example 4 using conditions summarized in Table 36.1. Data were collected using the TdT-coupled reaction and CE assay described in Example 6.

TABLE 36.1
Reaction conditions

Lysis Buffer - TEoA (pH 7.5), 0.1 g/L lysozyme; Lysis Conditions - 100 μL, 50° C., 60 min; Reaction
buffer - 50 mM Tris, 50 mM LiK(acetylphosphate), 10 μM ATP, 10 mM magnesium chloride, pH
8.0; Lysate concentration (vol %) - 25; Reaction Conditions - 1 μL, 30° C., 1 hr; Nucleoside substrate -
mG; Substrate Concentration - 10 mM; Auxiliary Cascade Enzymes (AdyK/AcK) - SEQ ID NO:
1182 (10 μM), SEQ ID NO: 1190 (10 μM); Dilution into Coupling Reaction - 800X; Substrate
Oligonucleotides - SEQ ID NO: 1163, SEQ ID NO: 1164; Product Oligonucleotides - SEQ ID NO:
1815, SEQ ID NO: 1816.

[0673] Activity relative to SEQ ID NO: 1568 (activity FIOP) was calculated based on the percentage of extension products observed for the variant compared with the percentage observed with SEQ ID NO: 1568 (where the percent product may be set as the average of replicates or else the highest single sample as appropriate). The results are shown in Table 36.2.

TABLE 36.2
Adenosine kinase activity relative to SEQ ID NO: 1568

| SEQ ID | | FIOP Activity 1 |
|---|---|---|
| NO: | Amino Acid Differences | Relative to |
| (nt/aa) | (Relative to SEQ ID NO: 1568) | SEQ ID NO: 1568 |
| 1579/1580 | D246V | ++ |
| 1591/1592 | N276G | + |
| 1593/1594 | R43E | ++ |
| 1595/1596 | D246S | ++ |
| 1597/1598 | A163G | + |
| 1599/1600 | E217A | + |
| 1601/1602 | Q31H | + |

Levels of increased activity were determined FIOP activity 1 relative to SEQ ID NO: 1568 and are defined as follows: “+” >1.7, “++” >2.1.

### Example 37

### Activity Improvements Over SEQ ID NO: 1568 in the Conversion of Nucleosides to Nucleotides

### HTP Screening for Improved AdoK Variants

[0674] AdoK of SEQ ID NO: 1568 was selected as the parent AdoK enzyme. Libraries of genes were produced from the parent gene using various techniques (e.g. saturation mutagenesis and recombination of previously identified beneficial mutations). The polypeptides encoded by each gene were produced in HTP and prepared as described in Table 37.1.

[0675] Reactions were performed as described in Example 4 using conditions summarized in Table 37.1. Data were collected using the TdT-coupled reaction and CE assay described in Example 6.

TABLE 37.1
Reaction conditions

Lysis Buffer - TEoA (pH 7.5), 0.1 g/L lysozyme; Lysis Conditions - 100 μL, 50° C., 60 min; Reaction
buffer - 50 mM Tris, 50 mM LiK(acetylphosphate), 10 μM ATP, 10 mM magnesium chloride, pH
8.0; Lysate concentration (vol %) - 25; Reaction Conditions - 1 μL, 30° C., 1 hr; Nucleoside substrate -
mG; Substrate Concentration - 10 mM; Auxiliary Cascade Enzymes (AdyK/AcK) - SEQ ID NO:
1184 (10 μM), SEQ ID NO: 1190 (10 μM); Dilution into Coupling Reaction - 800X; Substrate
Oligonucleotides - SEQ ID NO: 1163, SEQ ID NO: 1164; Product Oligonucleotides - SEQ ID NO:
1815, SEQ ID NO: 1816.

[0676] Activity relative to SEQ ID NO: 1568 (activity FIOP) was calculated based on the percentage of extension products observed for the variant compared with the percentage observed with SEQ ID NO: 1568 (where the percent product may be set as the average of replicates or else the highest single sample as appropriate). The results are shown in Table 37.2.

TABLE 37.2
Adenosine kinase activity relative to SEQ ID NO: 1568

| SEQ ID | | FIOP Activity 1 |
|---|---|---|
| NO: | Amino Acid Differences | Relative to |
| (nt/aa) | (Relative to SEQ ID NO: 1568) | SEQ ID NO: 1568 |
| 1603/1604 | R43E/N276E | +++ |
| 1605/1606 | N185S/P187S/N276G | +++ |
| 1607/1608 | R43E/P187S/S222Q/N276D | ++ |
| 1609/1610 | N185S/P187S/S222Q/N276D | ++ |
| 1611/1612 | P187S/N276E | ++ |
| 1613/1614 | P187S/N276D | ++ |
| 1615/1616 | N185S/N276E | ++ |
| 1617/1618 | E164S/S222Q | + |
| 1619/1620 | E164S/P187S/S222Q/N276G | + |
| 1621/1622 | R43E/S222Q/N276G | + |
| 1623/1624 | E164S/P187S/S222Q | + |
| 1625/1626 | S222Q | + |
| 1627/1628 | R43E/E164S/N185S/P187S/S222Q | + |
| 1629/1630 | S222Q/N276G | + |

Levels of increased activity were determined FIOP activity 1 relative to SEQ ID NO: 1568 and are defined as follows: “+” >1.2, “++” >1.55, “+++” >1.85.

### Example 38

### Stability Improvements Over SEQ ID NO: 1568 in the Conversion of Nucleosides to Nucleotides

### HTP Screening for Improved AdoK Variants

[0677] AdoK of SEQ ID NO: 1568 was selected as the parent AdoK enzyme. Libraries of genes were produced from the parent gene using various techniques (e.g. saturation mutagenesis and recombination of previously identified beneficial mutations). The polypeptides encoded by each gene were produced in HTP and prepared as described in Table 38.1.

[0678] Reactions were performed as described in Example 4 using conditions summarized in Table 38.1. Data were collected using the TdT-coupled reaction and CE assay described in Example 6.

TABLE 38.1
Reaction Conditions

Lysis Buffer - TEoA (pH 7.5), 0.1 g/L lysozyme; Lysis Conditions - 100 μL, 58° C., 60 min; Reaction
buffer - 50 mM Tris, 50 mM LiK(acetylphosphate), 10 μM ATP, 10 mM magnesium chloride, pH 8.0;
Lysate concentration (vol %) - 5; Reaction Conditions - 1 μL, 30° C., 1 hr; Nucleoside substrate - fG;
Substrate Concentration - 10 mM; Auxiliary Cascade Enzymes (AdyK/AcK) - SEQ ID NO: 1184 (10
μM), SEQ ID NO: 1190 (10 μM); Dilution into Coupling Reaction - 800X; Substrate
Oligonucleotides - SEQ ID NO: 1163, SEQ ID NO: 1164; Product Oligonucleotides - SEQ ID NO:
1809, SEQ ID NO: 1810.

[0679] Stability relative to SEQ ID NO: 1568 (activity FIOP) was calculated based on the percentage of extension products observed for the variant compared with the percentage observed with SEQ ID NO: 1568 (where the percent product may be set as the average of replicates or else the highest single sample as appropriate). The results are shown in Table 38.2.

TABLE 38.2
Adenosine kinase activity relative to SEQ ID NO: 1568

| | Amino Acid | |
|---|---|---|
| SEQ ID | Differences | FIOP Stability 1 |
| NO: | (Relative to | Relative to |
| (nt/aa) | SEQ ID NO: 1568) | SEQ ID NO: 1568 |
| 1605/1606 | N185S/P187S/N276G | + |
| 1609/1610 | N185S/P187S/S222Q/N276D | +++ |
| 1611/1612 | P187S/N276E | ++ |
| 1613/1614 | P187S/N276D | ++ |
| 1615/1616 | N185S/N276E | + |
| 1619/1620 | E164S/P187S/S222Q/N276G | + |
| 1623/1624 | E164S/P187S/S222Q | + |
| 1625/1626 | S222Q | + |
| 1629/1630 | S222Q/N276G | + |
| 1631/1632 | N276E | +++ |
| 1633/1634 | N276D | ++ |

Levels of increased activity were determined FIOP stability 1 relative to SEQ ID NO: 1568 and are defined as follows: “+” >1.58, “++” >4.17, “+++” >6.0.

### Example 39

### Activity Improvements Over SEQ ID NO: 1568 in the Conversion of Nucleosides to Nucleotides

### HTP Screening for Improved AdoK Variants

[0680] AdoK of SEQ ID NO: 1568 was selected as the parent AdoK enzyme. Libraries of genes were produced from the parent gene using various techniques (e.g. saturation mutagenesis and recombination of previously identified beneficial mutations). The polypeptides encoded by each gene were produced in HTP and prepared as described in Table 39.1.

[0681] Reactions were performed as described in Example 4 using conditions summarized in Table 39.1. Data were collected using the TdT-coupled reaction and CE assay described in Example 6.

TABLE 39.1
Reaction conditions

Lysis Buffer - TEoA (pH 7.5), 0.1 g/L lysozyme; Lysis Conditions - 100 μL, 58° C., 60 min; Reaction
buffer - 50 mM Tris, 50 mM LiK(acetylphosphate), 10 μM ATP, 10 mM magnesium chloride, pH 8.0;
Lysate concentration (vol %) - 5; Reaction Conditions - 1 μL, 30° C., 1 hr; Nucleoside substrate - fG;
Substrate Concentration - 10 mM; Auxiliary Cascade Enzymes (AdyK/AcK) - SEQ ID NO: 1184 (10
μM), SEQ ID NO: 1190 (10 μM); Dilution into Coupling Reaction - 800X; Substrate
Oligonucleotides - SEQ ID NO: 1163, SEQ ID NO: 1164; Product Oligonucleotides - SEQ ID NO:
1809, SEQ ID NO: 1810.

[0682] Activity relative to SEQ ID NO: 1568 (activity FIOP) was calculated based on the percentage of extension products observed for the variant compared with the percentage observed with SEQ ID NO: 1568 (where the percent product may be set as the average of replicates or else the highest single sample as appropriate). The results are shown in Table 39.2.

TABLE 39.2
Adenosine kinase activity relative to SEQ ID NO: 1568

| SEQ ID | | FIOP Activity 1 |
|---|---|---|
| NO: | Amino Acid Differences | Relative to SEQ ID |
| (nt/aa) | (Relative to SEQ ID NO: 1568) | NO: 1568 |
| 1581/1582 | A74R | ++ |
| 1585/1586 | T244R | +++ |
| 1589/1590 | E164S | + |
| 1635/1636 | Q31L | +++ |
| 1637/1638 | Q31Y | +++ |
| 1639/1640 | E164Q | ++ |
| 1641/1642 | H239M | ++ |
| 1643/1644 | M53L | + |
| 1645/1646 | N185S | + |
| 1647/1648 | E164A | + |

Levels of increased activity were determined FIOP activity 1 relative to SEQ ID NO: 1568 and are defined as follows: “+” >1.11, “++” >2.0, “+++” >2.64.

### Example 40

### Activity Improvements Over SEQ ID NO: 1616 in the Conversion of Nucleosides to Nucleotides

### HTP Screening for Improved AdoK Variants

[0683] AdoK of SEQ ID NO: 1616 was selected as the parent AdoK enzyme. Libraries of genes were produced from the parent gene using various techniques (e.g. saturation mutagenesis and recombination of previously identified beneficial mutations). The polypeptides encoded by each gene were produced in HTP and prepared as described in Table 40.1.

[0684] Reactions were performed as described in Example 4 using conditions summarized in Table 40.1. Data were collected using the TdT-coupled reaction and CE assay described in Example 6.

TABLE 40.1
Reaction conditions

Lysis Buffer - TEoA (pH 7.5), 0.1 g/L lysozyme; Lysis Conditions - 100 μL, 50° C., 60 min; Reaction
buffer - 50 mM Tris, 50 mM LiK(acetylphosphate), 10 μM ATP, 10 mM magnesium chloride, pH 8.0;
Lysate concentration (vol %) - 25; Reaction Conditions - 1 μL, 30° C., 1 hr; Nucleoside substrate - mG;
Substrate Concentration - 10 mM; Auxiliary Cascade Enzymes (AdyK/AcK) - SEQ ID NO: 1184 (10
μM), SEQ ID NO: 1190 (10 μM); Dilution into Coupling Reaction - 800X; Substrate
Oligonucleotides - SEQ ID NO: 1163, SEQ ID NO: 1164; Product Oligonucleotides - SEQ ID NO:
1815, SEQ ID NO: 1816.

[0685] Activity relative to SEQ ID NO: 1616 (activity FIOP) was calculated based on the percentage of extension products observed for the variant compared with the percentage observed with SEQ ID NO: 1616 (where the percent product may be set as the average of replicates or else the highest single sample as appropriate). The results are shown in Table 40.2.

TABLE 40.2
Adenosine kinase activity relative to SEQ ID NO: 1616

| SEQ ID | | FIOP Activity 1 |
|---|---|---|
| NO: | Amino Acid Differences | Relative to SEQ ID |
| (nt/aa) | (Relative to SEQ ID NO: 1616) | NO: 1616 |
| 1649/1650 | A74T/H239M/T244R/D246V | +++ |
| 1651/1652 | Q31Y/A74R/R207M/H239M/T244R/D246V | +++ |
| 1653/1654 | Q31Y/D246S | +++ |
| 1655/1656 | A74R/T244R | +++ |
| 1657/1658 | Q31R/A74R | ++ |
| 1659/1660 | M53L/A74T/H239M/T244R/D246S | ++ |
| 1661/1662 | M53L/A74R/H239M/T244R/D246V | ++ |
| 1663/1664 | Q31R/A74T/R207M/T244R/D246S | ++ |
| 1665/1666 | Q31Y/A74R/A163G/H239M/T244R | ++ |
| 1667/1668 | Q31Y/A74R/H239M/T244R/D246V | ++ |
| 1669/1670 | Q31L/T244R/D246S | ++ |
| 1671/1672 | Q31Y/T244R/D246S | + |
| 1673/1674 | Q31R/M53L/E164Q | + |
| 1675/1676 | Q31R/H239M/T244R | + |
| 1677/1678 | H239M/D246V | + |
| 1679/1680 | A163G/E164Q/R207M/H239M/T244R/D246V | + |
| 1681/1682 | Q31Y/A74R/A163G/D246V | + |
| 1683/1684 | T244R | + |
| 1685/1686 | Q31L/H239M/T244R/D246S | + |
| 1687/1688 | Q31Y/A74T | + |
| 1689/1690 | Q31L/M53L/H239M/T244R/D246V | + |
| 1691/1692 | Q31Y/A74R | + |
| 1693/1694 | Q31Y/R207M/T244R/D246V | + |

Levels of increased activity were determined FIOP activity 1 relative to SEQ ID NO: 1616 and are defined as follows: “+” >1.12, “++” >1.4, “+++” >1.8.

### Example 41

### Stability Improvements Over SEQ ID NO: 1616 in the Conversion of Nucleosides to Nucleotides

### HTP Screening for Improved AdoK Variants

[0686] AdoK of SEQ ID NO: 1616 was selected as the parent AdoK enzyme. Libraries of genes were produced from the parent gene using various techniques (e.g. saturation mutagenesis and recombination of previously identified beneficial mutations). The polypeptides encoded by each gene were produced in HTP and prepared as described in Table 41.1.

[0687] Reactions were performed as described in Example 4 using conditions summarized in Table 41.1. Data were collected using the TdT-coupled reaction and CE assay described in Example 6.

TABLE 41.1
Reaction conditions

Lysis Buffer - TEoA (pH 7.5), 0.1 g/L lysozyme; Lysis Conditions - 100 μL, 60° C., 60 min; Reaction
buffer - 50 mM Tris, 50 mM LiK(acetylphosphate), 10 μM ATP, 10 mM magnesium chloride, pH 8.0;
Lysate concentration (vol %) - 5; Reaction Conditions - 1 μL, 30° C., 1 hr; Nucleoside substrate - fG;
Substrate Concentration - 10 mM; Auxiliary Cascade Enzymes (AdyK/AcK) - SEQ ID NO: 1184 (10
μM), SEQ ID NO: 1190 (10 μM); Dilution into Coupling Reaction - 800X; Substrate
Oligonucleotides - SEQ ID NO: 1163, SEQ ID NO: 1164; Product Oligonucleotides - SEQ ID NO:
1809, SEQ ID NO: 1810.

[0688] Stability relative to SEQ ID NO: 1616 (activity FIOP) was calculated based on the percentage of extension products observed for the variant compared with the percentage observed with SEQ ID NO: 1616 (where the percent product may be set as the average of replicates or else the highest single sample as appropriate). The results are shown in Table 41.2.

TABLE 41.2
Adenosine kinase activity relative to SEQ ID NO: 1616

| SEQ ID | | FIOP Stability 1 |
|---|---|---|
| NO: | Amino Acid Differences | Relative to SEQ ID |
| (nt/aa) | (Relative to SEQ ID NO: 1616) | NO: 1616 |
| 1651/1652 | Q31Y/A74R/R207M/H239M/T244R/D246V | +++ |
| 1653/1654 | Q31Y/D246S | +++ |
| 1655/1656 | A74R/T244R | + |
| 1657/1658 | Q31R/A74R | + |
| 1659/1660 | M53L/A74T/H239M/T244R/D246S | + |
| 1661/1662 | M53L/A74R/H239M/T244R/D246V | + |
| 1663/1664 | Q31R/A74T/R207M/T244R/D246S | + |
| 1665/1666 | Q31Y/A74R/A163G/H239M/T244R | ++ |
| 1667/1668 | Q31Y/A74R/H239M/T244R/D246V | +++ |
| 1669/1670 | Q31L/T244R/D246S | + |
| 1671/1672 | Q31Y/T244R/D246S | + |
| 1673/1674 | Q31R/M53L/E164Q | ++ |
| 1675/1676 | Q31R/H239M/T244R | + |
| 1681/1682 | Q31Y/A74R/A163G/D246V | + |
| 1685/1686 | Q31L/H239M/T244R/D246S | + |
| 1687/1688 | Q31Y/A74T | +++ |
| 1689/1690 | Q31L/M53L/H239M/T244R/D246V | ++ |
| 1691/1692 | Q31Y/A74R | +++ |
| 1693/1694 | Q31Y/R207M/T244R/D246V | +++ |
| 1695/1696 | Q31Y/M53L/H239M/T244R/D246V | +++ |
| 1697/1698 | Q31Y | +++ |
| 1699/1700 | Q31L/M53L/A74T/H239M/D246S | ++ |
| 1701/1702 | Q31Y/A74R/R207M | ++ |
| 1703/1704 | Q31Y/A163G/R207M/T244R | ++ |
| 1705/1706 | Q31R/R207M/T244R/D246V | ++ |
| 1707/1708 | Q31Y/M53L/T244R | ++ |
| 1709/1710 | Q31Y/A163G | ++ |
| 1711/1712 | Q31R | + |
| 1713/1714 | Q31R/M53L/H239M/D246S | + |
| 1715/1716 | A74T/R207M/H239M/T244R | + |
| 1717/1718 | Q31L/A163G/E164Q/R207M/H239M/T244R/D246V | + |
| 1719/1720 | A74T/R207M | + |
| 1721/1722 | Q31Y/A163G/R207M/H239M/T244R | + |
| 1723/1724 | Q31L/A74R/A163G/E164Q/R207M/D246V | + |
| 1725/1726 | Q31Y/M53L/R207M/H239M | + |
| 1727/1728 | Q31Y/R207M/T244R/D246S | + |
| 1729/1730 | R207M | + |
| 1731/1732 | M53L/A163G/R207M/D246S | + |
| 1733/1734 | Q31R/M53L/A74T/A163G/R207M/D246S | + |
| 1735/1736 | Q31Y/A163G/H239M/D246V/E308K | + |
| 1737/1738 | Q31R/R207M/T244R/D246S | + |
| 1739/1740 | Q31Y/A74R/R207M/H239M/E308K | + |
| 1741/1742 | A163G/R207M/D246V | + |

Levels of increased activity were determined FIOP stability 1 relative to SEQ ID NO: 1616 and are defined as follows: “+” >1.27, “++” >12.8, “+++” >25.7.

### Example 42

### Stability Improvements Over SEQ ID NO: 1668 in the Conversion of Nucleosides to Nucleotides

### HTP Screening for Improved AdoK Variants

[0689] AdoK of SEQ ID NO: 1668 was selected as the parent AdoK enzyme. Libraries of genes were produced from the parent gene using various techniques (e.g. saturation mutagenesis and recombination of previously identified beneficial mutations). The polypeptides encoded by each gene were produced in HTP and prepared as described in Table 42.1.

[0690] Reactions were performed as described in Example 4 using conditions summarized in Table 42.1. Data were collected using the TdT-coupled reaction and CE assay described in Example 6.

TABLE 42.1
Reaction conditions

Lysis Buffer - TEoA (pH 7.5), 0.1 g/L lysozyme; Lysis Conditions - 100 μL, 63° C., 60 min; Reaction
buffer - 50 mM Tris, 50 mM LiK(acetylphosphate), 10 μM ATP, 10 mM magnesium chloride, pH 8.0;
Lysate concentration (vol %) - 10; Reaction Conditions - 1 μL, 30° C., 1 hr; Nucleoside substrate - mG;
Substrate Concentration - 10 mM; Auxiliary Cascade Enzymes - SEQ ID NO: 1186 (10 μM), SEQ ID
NO: 1190 (10 μM); Dilution into Coupling Reaction - 800X; Substrate Oligonucleotides - SEQ ID
NO: 1163, SEQ ID NO: 1164; Product Oligonucleotides - SEQ ID NO: 1815, SEQ ID NO: 1816.

[0691] Stability relative to SEQ ID NO: 1668 (activity FIOP) was calculated based on the percentage of extension products observed for the variant compared with the percentage observed with SEQ ID NO: 1668 (where the percent product may be set as the average of replicates or else the highest single sample as appropriate). The results are shown in Table 42.2.

TABLE 42.2
Adenosine kinase activity relative to SEQ ID NO: 1668

| SEQ ID | | FIOP Stability 1 |
|---|---|---|
| NO: | Amino Acid Differences | Relative to SEQ ID |
| (nt/aa) | (Relative to SEQ ID NO: 1668) | NO: 1668 |
| 1743/1744 | Q312R | +++ |
| 1745/1746 | D305T | +++ |
| 1747/1748 | V246D | ++ |
| 1749/1750 | R89K | ++ |
| 1751/1752 | K33A | ++ |
| 1753/1754 | Q218D | + |
| 1755/1756 | T147N | + |

Levels of increased activity were determined FIOP stability 1 relative to SEQ ID NO: 1668 and are defined as follows: “+” > 1.03, “++” > 1.13, “+++” > 1.34.

### Example 43

### Stability Improvements Over SEQ ID NO: 1668 in the Conversion of Nucleosides to Nucleotides

### HTP Screening for Improved AdoK Variants

[0692] AdoK of SEQ ID NO: 1668 was selected as the parent AdoK enzyme. Libraries of genes were produced from the parent gene using various techniques (e.g. saturation mutagenesis and recombination of previously identified beneficial mutations). The polypeptides encoded by each gene were produced in HTP and prepared as described in Table 43.1.

[0693] Reactions were performed as described in Example 4 using conditions summarized in Table 43.1. Data were collected using the TdT-coupled reaction and CE assay described in Example 6.

TABLE 43.1
Reaction conditions

Lysis Buffer-TEoA (pH 7.5), 0.1 g/L lysozyme; Lysis Conditions-100 μL, 65° C., 60 min; Reaction
buffer-50 mM Tris, 50 mM LiK(acetylphosphate), 10 μM ATP, 10 mM magnesium chloride, pH 8.0;
Lysate concentration (vol %)-5; Reaction Conditions-1 μL, 30° C., 1 hr; Nucleoside substrate-mU;
Substrate Concentration-10 mM; Auxiliary Cascade Enzymes-SEQ ID NO: 1186 (10 μM), SEQ ID
NO: 1190 (10 μM); Dilution into Coupling Reaction-800X; Substrate Oligonucleotides-SEQ ID NO:
1163, SEQ ID NO: 1164; Product Oligonucleotides-SEQ ID NO: 1813, SEQ ID NO: 1814.

[0694] Stability relative to SEQ ID NO: 1668 (activity FIOP) was calculated based on the percentage of extension products observed for the variant compared with the percentage observed with SEQ ID NO: 1668 (where the percent product may be set as the average of replicates or else the highest single sample as appropriate). The results are shown in Table 43.2.

TABLE 43.2
Adenosine kinase activity relative to SEQ ID NO: 1668

| SEQ ID | | FIOP Stability 1 |
|---|---|---|
| NO: | Amino Acid Differences | Relative to SEQ |
| (nt/aa) | (Relative to SEQ ID NO: 1668) | ID NO: 1668 |
| 1757/1758 | V27W/Q218D/D305T/Q312R | ++++ |
| 1759/1760 | V27K/H35Y/D106P/Q218D/Q312R | ++++ |
| 1761/1762 | V27W/Q218D/Q312R | ++++ |
| 1763/1764 | V27W/Q312R | ++++ |
| 1765/1766 | V27W/D305T/Q312R | ++++ |
| 1767/1768 | V27W/D106P/Q218D/Q312R | ++++ |
| 1769/1770 | V27W/Q218D | +++ |
| 1771/1772 | V27W/D106P/Q312R | +++ |
| 1773/1774 | H35Y/D305T | +++ |
| 1775/1776 | V27W/P144S/Q312R | +++ |
| 1777/1778 | V27W/Q218D/D305S | +++ |
| 1779/1780 | H35Y/Q312R | +++ |
| 1781/1782 | V27W/D106P/Q218D/D305S/Q312R | +++ |
| 1783/1784 | V27W/H35Y/D106P/Q312R | ++ |
| 1785/1786 | D106P/Q218D/D305T | ++ |
| 1787/1788 | V27W/D106P/Q218D/D305T/Q312R | ++ |
| 1789/1790 | D106P/Q218D/Q312R | ++ |
| 1791/1792 | V27W/D106P/D305T | ++ |
| 1793/1794 | V27W/H35Y/T94N/D106P/D305S/Q312R | ++ |
| 1795/1796 | H35Y/Q218D/Q312R | ++ |
| 1797/1798 | Q218D/Q312R | ++ |
| 1799/1800 | V27W/D106P/Q218D | ++ |
| 1801/1802 | H35Y/D106P/Q312R | ++ |
| 1803/1804 | V27W/D106P | ++ |
| 1805/1806 | V27W/D106P/D305S | + |
| 1807/1808 | V27W/H35Y/Q218D/Q312R | + |

Levels of increased activity were determined FIOP stability 1 relative to SEQ ID NO: 1668 and are defined as follows: “+” > 0.99, “++” > 1.1, “+++” > 2.0, “++++” > 3.0.

### Example 44

### Biosynthetic Cascade Reactions for Production of Nucleotide Triphosphates (NTPs) Using Pyruvate Oxidase (POx)

### NTP Biosynthetic Reaction Setup

[0695] Reactions were performed in 384-well format 40 μL BioRad PCR plates. AdoK variants were assayed in the presence of adenylate kinase (AdyK; U.S. Prov. Appl. No. 63/661,366, filed on Jun. 18, 2024 and 63/589,828 filed on Oct. 12, 2024), acetate kinase (AcK; U.S. Prov. Appl. No. 63/661,402, filed on Jun. 18, 2024 and 63/589,839 filed on Oct. 12, 2023), and pyruvate oxidase (Pox) variants to enable direct conversion of nucleosides to the corresponding triphosphate using potassium phosphate and sodium pyruvate as POx substrates. These enzyme were added as either purified enzymes at a specific molarity or as g/L lyophilized lysate powder which was prepared by lyophilizing clarified shake flask lysate prepared as in Example 3. The reactions were set up as follows: (i) all reaction components, except for the nucleoside substrate, pyruvate, phosphate and the AdoK lysate, were premixed in a single solution and were aliquoted into each well of the 384-well plates, (ii) AdoK lysate solution was then added into the wells, and (iii) an aliquot of the substrate nucleoside in DMSO and with an aliquot of equimolar sodium pyruvate and potassium phosphate was added to initiate the reaction. The reaction plate was heat-sealed with a peelable aluminum seal and incubated in a thermocycler at the indicated temperature and reaction time, then held at 10° C. prior to analysis.

### Example 45

### Activity Improvements Over SEQ ID NO: 1766 in the Conversion of Nucleosides to Nucleotides

### HTP Screening for Improved AdoK Variants

[0696] SEQ ID NO: 1766 was selected as the parent AdoK enzyme. Libraries of genes were produced from the parent gene using various techniques (e.g. saturation mutagenesis and recombination of previously identified beneficial mutations). The polypeptides encoded by each gene were produced in HTP and prepared as described in Table 45.1.

[0697] Reactions were performed as described in Example 44 using conditions summarized in Table 45.1. Data were collected using the TdT-coupled reaction and CE assay described in Example 6.

TABLE 45.1
Reaction conditions

Lysis Buffer-TEoA (pH 7.5), 0.1 g/L lysozyme; Lysis Conditions-100 μL, 50.0° C., 60 min; Reaction
buffer-50.0 mM Tris, 50.0 mM sodium pyruvate, 50.0 mM dibasic potassium phosphate, 10.0 μM
ATP, 10 mM magnesium chloride, pH 8.0; Lysate concentration (vol %)-2 (fG)/5 (mU); Reaction
Conditions-1.0 μL, 30.0° C., 1.0 hr; Nucleoside substrate-fG or mU; Substrate Concentration-10.0
mM; Auxiliary Cascade Enzymes-SEQ ID NO: 2126 (fG) or 2128 (mU) (10.0 μM), SEQ ID NO:
1190 (10.0 μM), SEQ ID NO: 2136 (2.0 μM); Dilution into Coupling Reaction-800X; Substrate
Oligonucleotides-SEQ ID NO: 1163, SEQ ID NO: 1164; Product Oligonucleotides-SEQ ID NO:
1169, SEQ ID NO: 1170, SEQ ID NO: 1813, SEQ ID NO: 1814.

[0698] Activity relative to SEQ ID NO: 1766 (activity FIOP) was calculated based on the percentage of extension products observed for the variant compared with the percentage observed with SEQ ID NO: 1766 (where the percent product may be set as the average of replicates or else the highest single sample as appropriate). The results are shown in Table 45.2.

TABLE 45-2
Adenosine kinase activity relative to SEQ ID NO: 1766

| | Amino Acid | FIOP % | |
|---|---|---|---|
| | Differences | yield fGTP | FIOP % yield |
| SEQ ID | (Relative to SEQ | relative to | mUTP relative to |
| NO: (nt/aa) | ID NO: 1766) | SEQ ID NO: 1766 | SEQ ID NO: 1766 |
| 1817/1818 | R253E | +++ | + |
| 1819/1820 | R253G | +++ | |
| 1821/1822 | R253L | +++ | |
| 1823/1824 | R253D | +++ | |
| 1825/1826 | R253S | +++ | + |
| 1827/1828 | R253K | ++ | + |
| 1829/1830 | A236C | ++ | |
| 1831/1832 | R253H | ++ | |
| 1833/1834 | R253T | ++ | |
| 1835/1836 | R254T | ++ | |
| 1837/1838 | P248E | + | |
| 1839/1840 | R254M | + | |
| 1841/1842 | T229V | + | |
| 1843/1844 | R253V | + | + |
| 1845/1846 | T229C | + | +++ |
| 1847/1848 | H128V | + | |
| 1849/1850 | T299G | | +++ |
| 1851/1852 | L292I | | +++ |
| 1853/1854 | A126L | | ++ |
| 1855/1856 | K293M | | ++ |
| 1857/1858 | G155T | | ++ |
| 1859/1860 | L183V | | + |
| 1861/1862 | Q179N | | + |
| 1863/1864 | Q112I | | + |
| 1865/1866 | N34C | | + |
| 1867/1868 | L292V | | + |
| 1869/1870 | L183S | | + |

Levels of increased activity were determined for FIOP % yield fGTP relative to SEQ ID NO: 1766 and are defined as follows: “+” > 1.1, “++” > 1.3, “+++” > 1.6. Levels of increased activity were determined for FIOP % yield mUTP relative to SEQ ID NO: 1766 and are defined as follows: “+” > 1.1, “++” > 1.25, “+++” > 1.6.

### Example 46

### Activity Improvements Over SEQ ID NO: 1826 in the Conversion of Nucleosides to Nucleotides

### HTP Screening for Improved AdoK Variants

[0699] SEQ ID NO: 1826 was selected as the parent AdoK enzyme. Libraries of genes were produced from the parent gene using various techniques (e.g. saturation mutagenesis and recombination of previously identified beneficial mutations). The polypeptides encoded by each gene were produced in HTP and prepared as described in Table 46.1.

[0700] Reactions were peformed as described in Example 44 using conditions summarized in Table 46.1. Data were collected using the TdT-coupled reaction and CE assay described in Example 6.

TABLE 46.1
Reaction conditions

Lysis Buffer-TEoA (pH 7.5), 0.1 g/L lysozyme; Lysis Conditions-100 μL, 50.0° C., 60 min; Reaction
buffer-50.0 mM Tris, 50.0 mM sodium pyruvate, 50.0 mM dibasic potassium phosphate, 10.0 μM
ATP, 10 mM magnesium chloride, pH 8.0; Lysate concentration (vol %)-5; Reaction Conditions-1.0
μL, 30.0° C., 16 hr; Nucleoside substrate-mU; Substrate Concentration-10.0 mM; Auxiliary Cascade
Enzymes-SEQ ID NO: 2128 (10.0 μM), SEQ ID NO: 1190 (10.0 μM), SEQ ID NO: 2138 (2.0 μM);
Dilution into Coupling Reaction-800X; Substrate Oligonucleotides-SEQ ID NO: 1163, SEQ ID NO:
1164; Product Oligonucleotides-SEQ ID NO: 1813, SEQ ID NO: 1814.

[0701] Activity relative to SEQ ID NO: 1826 (activity FIOP) was calculated based on the percentage of extension products observed for the variant compared with the percentage observed with SEQ ID NO: 1826 (where the percent product may be set as the average of replicates or else the highest single sample as appropriate). The results are shown in Table 46.2.

TABLE 46.2
Adenosine kinase activity relative to SEQ ID NO: 1826

| | | FIOP % yield fGTP |
|---|---|---|
| SEQ ID | Amino Acid Differences | relative to SEQ ID |
| NO: (nt/aa) | (Relative to SEQ ID NO: 1826) | NO: 1826 |
| 1871/1872 | R303D | ++ |
| 1873/1874 | L108A | ++ |
| 1875/1876 | A320G | ++ |
| 1877/1878 | A14S | ++ |
| 1879/1880 | A320R | ++ |
| 1881/1882 | V46I | + |
| 1883/1884 | H275S | + |
| 1885/1886 | K243F | + |
| 1887/1888 | A14T | + |
| 1889/1890 | D311E | + |
| 1891/1892 | A211R | + |
| 1893/1894 | P38R | + |
| 1895/1896 | V146C | + |
| 1897/1898 | R303S | + |

Levels of increased activity were determined for FIOP % yield fGTP relative to SEQ ID NO: 1826 and are defined as follows: “+” > 1.1, “++” > 1.2.

### Example 47

### Activity Improvements Over SEQ ID NO: 1826 in the Conversion of Nucleosides to Nucleotides

### HTP Screening for Improved AdoK Variants

[0702] SEQ ID NO: 1826 was selected as the parent AdoK enzyme. Libraries of genes were produced from the parent gene using various techniques (e.g. saturation mutagenesis and recombination of previously identified beneficial mutations). The polypeptides encoded by each gene were produced in HTP and prepared as described in Table 47.1.

[0703] Reactions were performed as described in Example 44 using conditions summarized in Table 47.1. Data were collected using the TdT-coupled reaction and CE assay described in Example 6.

TABLE 47.1
Reaction conditions

Lysis Buffer-TEoA (pH 7.5), 0.1 g/L lysozyme; Lysis Conditions-100 μL, 50.0° C., 60 min; Reaction
buffer-50.0 mM Tris, 50.0 mM sodium pyruvate, 50.0 mM dibasic potassium phosphate, 10.0 μM
ATP, 10 mM magnesium chloride, pH 8.0; Lysate concentration (vol %)-1; Reaction Conditions-1.0
μL, 30.0° C., 16 hr; Nucleoside substrate-fG; Substrate Concentration-10.0 mM; Auxiliary Cascade
Enzymes-SEQ ID NO: 2128 (10.0 μM), SEQ ID NO: 1190 (10.0 μM), SEQ ID NO: 2138 (2.0 μM);
Dilution into Coupling Reaction-800X; Substrate Oligonucleotides-SEQ ID NO: 1163, SEQ ID NO:
1164; Product Oligonucleotides-SEQ ID NO: 1169, SEQ ID NO: 1170.

[0704] Activity relative to SEQ ID NO: 1826 (activity FIOP) was calculated based on the percentage of extension products observed for the variant compared with the percentage observed with SEQ ID NO: 1826 (where the percent product may be set as the average of replicates or else the highest single sample as appropriate). The results are shown in Table 47.2.

TABLE 47-2
Adenosine kinase activity relative to SEQ ID NO: 1826

| | Amino Acid | FIOP % yield |
|---|---|---|
| SEQ ID | Differences (Relative | mUTP relative to |
| NO: (nt/aa) | to SEQ ID NO: 1826) | SEQ ID NO: 1826 |
| 1899/1900 | Q315S | ++ |
| 1901/1902 | R303V | ++ |
| 1903/1904 | L108E | ++ |
| 1905/1906 | T94M | + |
| 1907/1908 | E194R | + |
| 1909/1910 | Q274R | + |
| 1911/1912 | A307G | + |
| 1913/1914 | D106L | + |

Levels of increased activity were determined for FIOP % yield mUTP relative to SEQ ID NO: 1826 and are defined as follows: “+” > 1.2,“++” > 1.97.

### Example 48

### Activity Improvements Over SEQ ID NO: 1826 in the Conversion of Nucleosides to Nucleotides

### HTP Screening for Improved AdoK Variants

[0705] SEQ ID NO: 1826 was selected as the parent AdoK enzyme. Libraries of genes were produced from the parent gene using various techniques (e.g. saturation mutagenesis and recombination of previously identified beneficial mutations). The polypeptides encoded by each gene were produced in HTP and prepared as described in Table 48.1.

[0706] Reactions were performed as described in Example 44 using conditions summarized in Table 48.1. Data were collected using the TdT-coupled reaction and CE assay described in Example 6.

TABLE 48.1
Reaction conditions

Lysis Buffer-TEoA (pH 7.5), 0.1 g/L lysozyme; Lysis Conditions-100 μL, 50.0° C., 60 min; Reaction
buffer-50.0 mM Tris, 50.0 mM sodium pyruvate, 50.0 mM dibasic potassium phosphate, 10.0 μM
ATP, 10 mM magnesium chloride, pH 8.0; Lysate concentration (vol %)-10.0; Reaction Conditions-
1.0 μL, 30.0° C., 16 hr; Nucleoside substrate-mU; Substrate Concentration-10.0 mM; Auxiliary
Cascade Enzymes-SEQ ID NO: 2128 (10 μM), SEQ ID NO: 1190 (10 μM), SEQ ID NO: 2138 (2.0
μM); Dilution into Coupling Reaction-800X; Substrate Oligonucleotides-SEQ ID NO: 1163, SEQ
ID NO: 1164; Product Oligonucleotides-SEQ ID NO: 1813, SEQ ID NO: 1814.

[0707] Activity relative to SEQ ID NO: 1826 (activity FIOP) was calculated based on the percentage of extension products observed for the variant compared with the percentage observed with SEQ ID NO: 1826 (where the percent product may be set as the average of replicates or else the highest single sample as appropriate). The results are shown in Table 48.2.

TABLE 48.2
Adenosine kinase activity relative to SEQ ID NO: 1826

| | | FIOP % yield mUTP |
|---|---|---|
| SEQ ID NO: | Amino Acid Differences | relative to |
| (nt/aa) | (Relative to SEQ ID NO: 1826) | SEQ ID NO: 1826 |
| 1915/1916 | G155T/T299G | +++ |
| 1917/1918 | A126L/T299G | +++ |
| 1919/1920 | Q112I/L183V/L292I/T299G | +++ |
| 1921/1922 | G155T/L183V/T299G | ++ |
| 1923/1924 | V255I/T299G | ++ |
| 1925/1926 | L183V/T299G | ++ |
| 1927/1928 | L183V/V255I/T299G | ++ |
| 1929/1930 | G155T | + |
| 1931/1932 | Q112I/L292I | + |
| 1933/1934 | L292I | + |
| 1935/1936 | T229H/T299G | + |

Levels of increased activity were determined for FIOP % yield mUTP relative to SEQ ID NO: 1826 and are defined as follows: “+” > 1.87, “++” > 2.38, “+++” > 3.8.

### Example 49

### Activity Improvements Over SEQ ID NO: 1918 in the Conversion of Nucleosides to Nucleotides

### HTP Screening for Improved AdoK Variants

[0708] SEQ ID NO: 1918 was selected as the parent AdoK enzyme. Libraries of genes were produced from the parent gene using various techniques (e.g. saturation mutagenesis and recombination of previously identified beneficial mutations). The polypeptides encoded by each gene were produced in HTP and prepared as described in Table 49.1.

[0709] Reactions were performed as described in Example 44 using conditions summarized in Table 49.1. Data were collected using the TdT-coupled reaction and CE assay described in Example 6.

TABLE 49.1
Reaction conditions

Lysis Buffer-TEoA (pH 7.5), 0.1 g/L lysozyme; Lysis Conditions-100 μL, 50° C., 60 min; Reaction
buffer-50 mM Tris, 50 mM sodium pyruvate, 50 mM dibasic potassium phosphate, 10 μM ATP, 10
mM magnesium chloride, pH 8.0; Lysate concentration (vol %)-5; Reaction Conditions-1 μL, 30° C.,
16 hr; Nucleoside substrate-mU or mA; Substrate Concentration-10 mM; Auxiliary Cascade
Enzymes-SEQ ID NO: 2130 (10 μM), SEQ ID NO: 2134 (0.25 g/L lyophilized lysate), SEQ ID NO:
2138 (2 μM); Dilution into Coupling Reaction-800X; Substrate Oligonucleotides-SEQ ID NO: 1163,
SEQ ID NO: 1164; Product Oligonucleotides-SEQ ID NO: 1813, SEQ ID NO: 1814.

[0710] Activity relative to SEQ ID NO: 1918 (activity FIOP) was calculated based on the percentage of extension products observed for the variant compared with the percentage observed with SEQ ID NO: 1918 (where the percent product may be set as the average of replicates or else the highest single sample as appropriate). The results are shown in Table 49.2.

TABLE 49.2
Adenosine kinase activity relative to SEQ ID NO: 1918

| | Amino Acid | | FIOP % yield |
|---|---|---|---|
| SEQ ID | Differences | FIOP % yield | mATP |
| NO: | (Relative to SEQ | mUTP relative to | relative to |
| (nt/aa) | ID NO: 1918) | SEQ ID NO: 1918 | SEQ ID NO: 1918 |
| 1937/1938 | W27S | +++ | |
| 1939/1940 | W27R | +++ | +++ |
| 1941/1942 | T252A | +++ | ++ |
| 1943/1944 | W27G | ++ | + |
| 1945/1946 | H35E | ++ | ++ |
| 1947/1948 | F28L | ++ | |
| 1949/1950 | W27C | ++ | |
| 1951/1952 | Y316I | ++ | + |
| 1953/1954 | F28M | ++ | + |
| 1955/1956 | Q218R | ++ | |
| 1957/1958 | H35D | + | ++ |
| 1959/1960 | M239H | + | +++ |
| 1961/1962 | Y245Q | + | |
| 1963/1964 | Y31H | + | +++ |
| 1965/1966 | M239A | + | + |
| 1967/1968 | M239T | + | +++ |
| 1969/1970 | H42N | | +++ |
| 1971/1972 | M239I | | ++ |
| 1973/1974 | V237Q | | ++ |
| 1975/1976 | Y316A | | ++ |
| 1977/1978 | H42G | | ++ |
| 1979/1980 | M26F | | ++ |
| 1981/1982 | R212A | | ++ |
| 1983/1984 | P29G | | ++ |
| 1985/1986 | V246A | | ++ |
| 1987/1988 | V237K | | ++ |
| 1989/1990 | M239G | | ++ |
| 1991/1992 | K33A | | + |
| 1993/1994 | H42Q | | + |
| 1995/1996 | K33P | | + |
| 1997/1998 | T252G | | + |
| 1999/2000 | V237L | | + |
| 2001/2002 | E276G | | + |
| 2003/2004 | Y136F | | + |
| 2005/2006 | Y245F | | + |
| 2007/2008 | V246T | | + |
| 2009/2010 | M239W | | + |

Levels of increased activity were determined for FIOP % yield mUTP relative to SEQ ID NO: 1918 and are defined as follows: “+” > 1.5, “++” > 1.9, “+++” > 2.5. Levels of increased activity were determined for FIOP % yield mATP relative to SEQ ID NO: 1918 and are defined as follows: “+” > 1.8, “++” > 2.2, “+++” > 2.6.

### Example 50

### Activity Improvements Over SEQ ID NO: 1942 in the Conversion of Nucleosides to Nucleotides

### HTP Screening for Improved AdoK Variants

[0711] SEQ ID NO: 1942 was selected as the parent AdoK enzyme. Libraries of genes were produced from the parent gene using various techniques (e.g. saturation mutagenesis and recombination of previously identified beneficial mutations). The polypeptides encoded by each gene were produced in HTP and prepared as described in Table 50.1.

[0712] Reactions were performed as described in Example 44 using conditions summarized in Table 50.1. Data were collected using the TdT-coupled reaction and CE assay described in Example 6.

TABLE 50.1
Reaction conditions

Lysis Buffer-TEoA (pH 7.5), 0.1 g/L lysozyme; Lysis Conditions-100 μL, 50° C., 60 min; Reaction
buffer-50 mM Tris, 50 mM sodium pyruvate, 50 mM dibasic potassium phosphate, 10 μM ATP, 10
mM magnesium chloride, pH 8.0; Lysate concentration (vol %)-2.5; Reaction Conditions-1 μL, 30°
C., 16 hr; Nucleoside substrate-mG; Substrate Concentration-10 mM; Auxiliary Cascade Enzymes-
SEQ ID NO: 2132 (10 μM), SEQ ID NO: 2134 (0.25 g/L lyophilized lysate), SEQ ID NO: 2138 (2
μM); Dilution into Coupling Reaction-800X; Substrate Oligonucleotides-SEQ ID NO: 1163, SEQ
ID NO: 1164; Product Oligonucleotides-SEQ ID NO: 1815, SEQ ID NO: 1816.

[0713] Activity relative to SEQ ID NO: 1942 (activity FIOP) was calculated based on the percentage of extension products observed for the variant compared with the percentage observed with SEQ ID NO: 1942 (where the percent product may be set as the average of replicates or else the highest single sample as appropriate). The results are shown in Table 50.2.

TABLE 50.2
Adenosine kinase activity relative to SEQ ID NO: 1942

| | | FIOP % yield | FIOP % yield |
|---|---|---|---|
| | Amino Acid Differences | mUTP relative | mGTP relative |
| SEQ ID | (Relative to SEQ ID | to SEQ ID | to SEQ ID |
| NO: (nt/aa) | NO: 1942) | NO: 1942 | NO: 1942 |
| 2011/2012 | L126A | +++ | ++ |
| 2013/2014 | L126A/G155T/M239H/Y316I | +++ | |
| 2015/2016 | W27G/L126A | +++ | +++ |
| 2017/2018 | Y31H/L126A/G155T | +++ | + |
| 2019/2020 | D30G/K33A/H35D | ++ | |
| 2021/2022 | W27G/P29G | ++ | +++ |
| 2023/2024 | D30G/Y31H/K33A/L126A/ | ++ | + |
| | E276G/Y316I | | |
| 2025/2026 | L126A/G155T | ++ | |
| 2027/2028 | Y245F | ++ | |
| 2029/2030 | W27G/Y31H/G155T | ++ | |
| 2031/2032 | L126A/M239H/Y316I | ++ | ++ |
| 2033/2034 | P29G/Y31H | ++ | |
| 2035/2036 | K33A/L126A/M239H | ++ | ++ |
| 2037/2038 | M26F/W27R/F28L/Y31H | ++ | + |
| 2039/2040 | Y316I | + | |
| 2041/2042 | W27G/L126A/G155T | + | |
| 2043/2044 | W27G/P29G/Y245F | + | ++ |
| 2045/2046 | L126A/Y316I | + | ++ |
| 2047/2048 | W27R/F28M/P29G/L126A | + | + |
| 2049/2050 | W27R/P29G/L126A | + | |
| 2051/2052 | G155T/Y316I | + | |
| 2053/2054 | G155T/E276G/Y316I | + | |
| 2055/2056 | L126A/G155T/V237K | + | |
| 2057/2058 | P29G/Y31H/L126A/M239T | + | |
| 2059/2060 | H42N | + | |
| 2061/2062 | Q218N | + | |
| 2063/2064 | Q218N/M239H/Y316I | + | +++ |
| 2065/2066 | L126A/G155T/M239T/E276G | + | |
| 2067/2068 | M239H | + | + |
| 2069/2070 | W27G/P29G/V237K | + | + |
| 2071/2072 | F28L/M239T | + | + |
| 2073/2074 | W27G/P29G/V237Q | + | + |
| 2075/2076 | L126A/M239H | + | + |
| 2077/2078 | Y31H/K33A/Q218N/E276G | + | + |
| 2079/2080 | W27R | + | |
| 2081/2082 | M26F/W27R/F28M/Y245F | + | + |
| 2083/2084 | W27G/F28M | + | ++ |
| 2085/2086 | F28M/Y31H | + | + |
| 2087/2088 | W27G/Y245F | | +++ |
| 2089/2090 | F28M | | +++ |
| 2091/2092 | W27G | | ++ |
| 2093/2094 | A252T/E276G | | ++ |
| 2095/2096 | M26F/F28M/Y31H | | ++ |
| 2097/2098 | W27G/V237K | | + |
| 2099/2100 | W27G/L126A/V237K | | + |
| 2101/2102 | M26F/W27G/F28M | | + |
| 2103/2104 | W27R/Y245F | | + |
| 2105/2106 | F28M/H42N/L126A/Y245F | | + |
| 2107/2108 | F28M/H42N/Y245F | | + |
| 2109/2110 | D30G/Y31H/K33A/H35D/ | | + |
| | L126A/Q218N | | |
| 2111/2112 | W27G/Y31H/L126A/Y245F | | + |
| 2113/2114 | F28L/Y31H/M239T | | + |
| 2115/2116 | Y31H/L126A | | + |
| 2117/2118 | M26F/W27R | | + |
| 2119/2120 | L126A/Y245F | | + |
| 2121/2122 | W27G/L126A/V237Q/Y245F | | + |
| 2123/2124 | K33A | | + |

Levels of increased activity were determined for FIOP % yield mUTP relative to SEQ ID NO: 1942 and are defined as follows: “+” > 1.3, “++” > 1.7, “+++” > 2.0. Levels of increased activity were determined for FIOP % yield mGTP relative to SEQ ID NO: 1942 and are defined as follows: “+” > 1.2, “++” > 1.9, “+++” > 2.5.

### Example 51

### Relative Activities of AdoK Variants for the Conversion of Nucleosides to Nucleotides

### Shake Flask Characterization of AdoK Variants

[0714] AdoK variants SEQ ID NO: 2, SEQ ID NO: 896, SEQ ID NO: 1366, SEQ ID NO: 1464, SEQ ID NO: 1616, SEQ ID NO: 1766, SEQ ID NO: 1918, and SEQ ID NO: 2014 were expressed as described in Example 3 and either purified or lyophilized.

[0715] To assess activity, each variant was added to a 5 μL reaction at a final concentration of 10 μM. The reaction contained 50 mM Tri s (pH 8.0), 50 mM sodium pyruvate, 50 mM potassium phosphate, 10 μM ATP, 10 mM MgCl₂, 0.4 g/L lyophilized lysate SEQ ID NO: 2132, 0.25 g/L lyophilized lysate SEQ ID NO: 2134, 0.25 g/L lyophilized lysate SEQ ID NO: 2138 and 10 mM nucleoside. Reactions were incubated in a Multitron (Infors) shaker at 30° C. and 600 rpm for 16 hours. Reactions were then quenched and diluted 40-fold with 75% methanol and analyzed by HPLC as described in Example 5. Relative activities were normalized to the lowest observed activity by a variant on a given substrate. The results are shown in Table 51.1.

TABLE 51.1
Adenosine kinase activity on varied substrates

| SEQ ID | | | | | | | | |
|---|---|---|---|---|---|---|---|---|
| NO: | % yield | % yield | % yield | % yield | % yield | % yield | % yield | % yield |
| (nt/aa) | fATP | fCTP | fGTP | fUTP | mATP | mCTP | mGTP | mUTP |
| 895/896 | ++ | +++ | +++ | +++ | +++ | + | + | + |
| 1143/1144 | ++ | + | +++ | ++ | + | + | + | + |
| 1365/1366 | +++ | ++ | +++ | +++ | +++ | + | + | + |
| 1463/1464 | +++ | +++ | +++ | +++ | +++ | + | ++ | ++ |
| 1615/1616 | ++ | +++ | +++ | +++ | +++ | ++ | ++ | +++ |
| 1765/1766 | ++ | ++ | ++ | ++ | +++ | ++ | ++ | ++ |
| 1917/1918 | ++ | +++ | +++ | +++ | +++ | ++ | ++ | +++ |
| 2013/2014 | | +++ | +++ | +++ | +++ | +++ | +++ | +++ |

Levels of activity were determined for each nucleotide in terms of % yield to the corresponding NTP and are defined as follows: “+” > 0.1, “++” > 2.5, “+++” > 20.0.

[0716] While the invention has been described with reference to the specific embodiments, various changes can be made and equivalents can be substituted to adapt to a particular situation, material, composition of matter, process, process step or steps, without departing from the spirit and scope of the invention.

[0717] For all purposes, each and every publication and patent document cited in this disclosure is incorporated herein by reference as if each such publication or document was specifically and individually indicated to be incorporated herein by reference. Citation of publications and patent documents is not intended as an indication that any such document is pertinent prior art, nor does it constitute an admission as to its contents or date.

What is claimed is:

1. An engineered adenosine kinase comprising an amino acid sequence having at least 70%, 75%, 80%, 81%, 82%, 83%, 84%, 85%, 86%, 87%, 88%, 89%, 90%, 91%, 92%, 93%, 94%, 95%, 96%, 97%, 98%, 99%, or more sequence identity to a reference sequence corresponding to amino acid residues 12-321 of an even-numbered SEQ ID NO. of SEQ ID NOs: 2-1142, 1194-1808, and 1818-2124, or to a reference sequence corresponding to an even-numbered SEQ ID NO. of SEQ ID NOs: 2-1142, 1194-1808, and 1818-2124, wherein the amino acid sequence comprises one or more substitutions relative to the reference sequence corresponding to amino acid residues 12-321 of SEQ ID NO: 2, 90, 254, 370, 734, 896, 1196, 1366, 1382, 1464, 1568, 1616, 1668, 1766, 1826, 1918, or 1942 or relative to the reference sequence corresponding to SEQ ID NO: 2, 90, 254, 370, 734, 896, 1196, 1366, 1382, 1464, 1568, 1616, 1668, 1766, 1826, 1918, or 1942.

2. The engineered adenosine kinase of claim 1, comprising an amino acid sequence having at least 70%, 75%, 80%, 81%, 82%, 83%, 84%, 85%, 86%, 87%, 88%, 89%, 90%, 91%, 92%, 93%, 94%, 95%, 96%, 97%, 98%, 99%, or more sequence identity to a reference sequence corresponding to amino acid residues 12-321 of SEQ ID NO: 2, 90, 254, 370, 734, 896, 1196, 1366, 1382, 1464, 1568, 1616, 1668, 1766, 1826, 1918, or 1942 or to a reference sequence corresponding to SEQ ID NO: 2, 90, 254, 370, 734, 896, 1196, 1366, 1382, 1464, 1568, 1616, 1668, 1766, 1826, 1918, or 1942, wherein the amino acid sequence comprises one or more substitutions relative to the reference sequence corresponding to amino acid residues 12-321 of SEQ ID NO: 2, 90, 254, 370, 734, 896, 1196, 1366, 1382, 1464, 1568, 1616, 1668, 1766, 1826, 1918, or 1942 or relative to the reference sequence corresponding to SEQ ID NO: 2, 90, 254, 370, 734, 896, 1196, 1366, 1382, 1464, 1568, 1616, 1668, 1766, 1826, 1918, or 1942.

3. The engineered adenosine kinase of claim 1, comprising an amino acid sequence having at least 70%, 75%, 80%, 81%, 82%, 83%, 84%, 85%, 86%, 87%, 88%, 89%, 90%, 91%, 92%, 93%, 94%, 95%, 96%, 97%, 98%, 99%, or more sequence identity to the reference sequence corresponding to amino acid residues 12-321 of SEQ ID NO: 2, or to the reference sequence corresponding to SEQ ID NO: 2, wherein the amino acid sequence comprises one or more substitutions relative to the reference sequence corresponding to amino acid residues 12-321 of SEQ ID NO: 2, or relative to the reference sequence corresponding to SEQ ID NO: 2.

4. The engineered adenosine kinase of claim 1, comprising an amino acid sequence having at least 70%, 75%, 80%, 81%, 82%, 83%, 84%, 85%, 86%, 87%, 88%, 89%, 90%, 91%, 92%, 93%, 94%, 95%, 96%, 97%, 98%, 99%, or more sequence identity to the reference sequence corresponding to amino acid residues 12-321 of SEQ ID NO: 90, 254, 370, 734, 896, 1196, 1366, 1382, 1464, 1568, 1616, 1668, 1766, 1826, 1918, or 1942, or to the reference sequence corresponding to SEQ ID NO: 90, 254, 370, 734, 896, 1196, 1366, 1382, 1464, 1568, 1616, 1668, 1766, 1826, 1918, or 1942, wherein the amino acid sequence comprises one or more substitutions relative to the reference sequence corresponding to amino acid residues 12-321 of SEQ ID NO: 2, or relative to the reference sequence corresponding to SEQ ID NO: 2.

5. The engineered adenosine kinase of claim 1, comprising an amino acid sequence having at least 70%, 75%, 80%, 81%, 82%, 83%, 84%, 85%, 86%, 87%, 88%, 89%, 90%, 91%, 92%, 93%, 94%, 95%, 96%, 97%, 98%, 99%, or more sequence identity to a reference sequence corresponding to amino acid residues 12-321 of an even-numbered SEQ ID NO. of SEQ ID NOs: 4-1142, 1194-1808, and 1818-2124 or to a reference sequence corresponding to an even-numbered SEQ ID NO. of SEQ ID NOs: 4-1142, 1194-1808, and 1818-2124, wherein the amino acid sequence comprises one or more substitutions relative to the reference sequence corresponding to amino acid residues 12-321 of SEQ ID NO: 2, or relative to the reference sequence corresponding to SEQ ID NO: 2.

6. The engineered adenosine kinase of any one of claims 1-5, wherein the amino acid sequence of the engineered adenosine kinase comprises at least a substitution at amino acid position 13, 14, 20, 21, 23, 24, 26, 27, 28, 29, 30, 31, 33, 34, 35, 38, 40, 41, 42, 43, 46, 49, 50, 51, 52, 53, 54, 55, 56, 64, 67, 73, 74, 77, 79, 80, 83, 86, 87, 89, 90, 91, 92, 93, 94, 100, 101, 102, 103, 104, 106, 107, 108, 109, 111, 112, 113, 116, 119, 120, 121, 126, 128, 129, 130, 133, 134, 136, 141, 144, 146, 147, 151, 152, 155, 156, 157, 160, 162, 163, 164, 167, 168, 169, 170, 171, 172, 177, 179, 180, 181, 182, 183, 185, 187, 188, 190, 191, 192, 194, 195, 196, 197, 202, 206, 207, 208, 210, 211, 212, 215, 216, 217, 218, 221, 222, 225, 229, 231, 232, 233, 234, 236, 237, 238, 239, 240, 241, 242, 243, 244, 245, 246, 247, 248, 249, 250, 251, 252, 253, 254, 255, 256, 258, 265, 271, 274, 275, 276, 287, 288, 291, 292, 293, 294, 295, 296, 299, 303, 305, 307, 308, 310, 311, 312, 314, 315, 316, 317, or 320, or combinations thereof, wherein the amino acid positions are relative to the reference sequence corresponding to amino acid residues 12-321 of SEQ ID NO: 2, or relative to the reference sequence corresponding to SEQ ID NO: 2.

7. The engineered adenosine kinase of any one of claims 1-6, wherein the amino acid sequence of the engineered adenosine kinase comprises at least a substitution, or amino acid residue 13A/E/P, 14S/T/V, 20F/V, 21G, 23N, 241/N/V, 26F, 27A/C/G/K/P/R/S/W, 28L/M, 29G/R, 30G/Y, 31F/H/L/R/W/Y, 33A/P/Q/S, 34C/G/K/R, 35D/E/S/V/Y, 38C/R/V, 40H/M/R/W, 41L, 42D/G/N/Q, 43E/K/R/S/V, 46I, 49M, 50C, 51F/G/S, 52C/D/F/G/S/T, 53L/R, 54V, 55H, 56F/G/S/Y, 64M/T, 67G, 73A/C/E/M, 74F/I/K/R/T/V, 77V, 79A, 80M/S/V, 83F/L/S/T/V, 86L/Q, 87K, 89G/K/L/T, 90L/R/S/T/V, 91Y, 92M, 93A, 94M/N, 100G, 101F/W, 102I, 103L/Q/R, 104A/C/D/G/L/N/P/R/S/T/W/Y, 106E/G/L/M/P/R/T, 107A/G/H/S/T, 108A/C/E, 109E/G/L/P/R/S/T, 111A/G/L, 112I/L, 113G/S, 116M, 119C/G/M/Q/R/S/T/V, 120C, 121F/H/L/M/Q, 126L/S, 128F/V/W, 129A/G/S, 130A, 133A/L, 134H, 136F/H, 141S, 144Q/S, 146C/I, 147A/N/S, 151L, 152A/C, 155A/I/N/T/V/W, 156Y, 157P, 160L, 162F, 163G, 164A/G/K/Q/S/W, 167F/T/V/W, 168R/V, 169A/C/D/I/L/M/S, 170D/H/K/M/R/S/V, 171C/V, 172S, 177V, 179N, 180Q, 181A/C/L/V, 182G, 183M/S/V, 185S/T, 187H/Q/S/V, 188T, 190I, 191A/R/S/W, 192L, 194A/R, 195G/M/T/V, 196S, 197R, 202F, 206A/H, 207A/L/M/R/T/V, 211A/C/F/H/I/K/L/M/R/T/W, 212A, 215L, 216V, 217A/V, 218D/L/N/R/V, 221A, 222A/G/M/Q, 225E/G, 229C/H/V, 231L/M/V, 232S, 233A/S/V, 234A/M/N/R/V/Y, 236C/S/V, 237K/I/L/M/Q/V, 238L, 239A/F/G/H/I/M/Q/R/T/W, 240L/V, 241R, 242D/T, 243F/G/R/Y, 244R/W, 245F/Q/W, 246A/R/S/T/V, 247L, 248E/G/K/L/R/V, 249A/G/I/L/M/R/S, 250H/I/M/T, 251K/L/T/V, 252A/C/G/K/T/V, 253D/E/G/H/K/L/P/S/T/V, 254I/L/M/P/Q/T, 255A/C/E/G/I/K/S/W, 256C/H/M, 258R/S/V, 265Y, 271W, 274R, 275S, 276D/E/G/S, 287A/S/V/Y, 288V, 291G, 292F/I/K/V, 293M, 294L, 295A, 296N, 299G/S, 303D/F/H/M/S/V/W, 305S/T, 307F/G, 308D/F/L/V, 310A/C, 311E/F/G/L/M/Q/R/S/T, 312R, 314Q/S/V, 315S, 316A/D/E/I/K/S/Y, 317M/W/Y, or 320G/R/S, or combinations thereof, wherein the amino acid positions are relative to the reference sequence corresponding to amino acid residues 12-321 of SEQ ID NO: 2, or relative to the reference sequence corresponding to SEQ ID NO: 2.

8. The engineered adenosine kinase of any one of claims 1-5, wherein the amino acid sequence of the engineered adenosine kinase comprises at least a substitution at amino acid position 24, 27, 31, 40, 43, 51, 52, 74, 77, 79, 109, 113, 119, 121, 126, 129, 169, 181, 185, 207, 211, 233, 234, 237, 239, 244, 246, 249, 251, 252, 253, 276, 299, 305, 312, or 316, or combinations thereof, wherein the amino acid positions are relative to the reference sequence corresponding to amino acid residues 12-321 of SEQ ID NO: 2, or relative to the reference sequence corresponding to SEQ ID NO: 2.

9. The engineered adenosine kinase of any one of claims 1-5 and 8, wherein the amino acid sequence of the engineered adenosine kinase comprises at least a substitution, or amino acid residue 241/N/V, 27A/C/G/K/P/R/S/W, 31F/H/L/R/W/Y, 40H/M/R/W, 43E/K/R/S/V, 51F/G/S, 52C/D/F/G/S/T, 74F/I/K/R/T/V, 77V, 79A, 109E/G/L/P/R/S/T, 113G/S, 119C/G/M/Q/R/S/T/V, 121F/H/L/M/Q, 126L/S, 129A/G/S, 169A/C/D/I/L/M/S, 181A/C/L/V, 185S/T, 207A/L/M/R/T/V, 211A/C/F/H/I/K/L/M/T/W, 233A/S/V, 234A/M/N/R/V/Y, 237K/I/L/M/Q/V, 239A/F/G/H/I/M/Q/R/T/W, 244R/W, 246A/R/S/T/V, 249A/G/I/L/M/R/S, 251K/L/T/V, 252A/C/G/K/T/V, 253D/E/G/H/K/L/P/S/T/V, 276D/E/G/S, 299G/S, 305S/T, 312R, or 316A/D/E/I/K/S/Y, or combinations thereof, wherein the amino acid positions are relative to the reference sequence corresponding to amino acid residues 12-321 of SEQ ID NO: 2, or relative to the reference sequence corresponding to SEQ ID NO: 2.

10. The engineered adenosine kinase of any one of claims 1-5 and 8, wherein the amino acid sequence of the engineered adenosine kinase comprises at least a substitution or amino acid residue 24N, 27W, 31Y, 40R, 43R, 51F, 52D, 74R, 77V, 79A, 109S, 113G, 119M, 121H/Q, 126L, 129G/S, 169M, 181L/V, 185S, 207R, 211A/T, 233S, 234A, 237V, 239M, 244R, 246V, 249A, 251K, 252A/T, 253S, 276E, 299G, 305T, 312R, or 316D/Y, or combinations thereof, wherein the amino acid positions are relative to the reference sequence corresponding to amino acid residues 12-321 of SEQ ID NO: 2, or relative to the reference sequence corresponding to SEQ ID NO: 2.

11. The engineered adenosine kinase of any one of claims 1-5, wherein the amino acid sequence of the engineered adenosine kinase comprises at least a substitution or substitution set at amino acid position(s) 109/111, 104/111, 38, 40, 111, 55/316, 258, 106/111, 103/111, 121, 207, 316, 43, 254, 233, 130, 249, 107/111, 253, 210, 136/249, 208, 34, 211, 308, 181, 248, 56, 89, 67, 111/121/233/316, 111/121/181/211/233/248/308/316, 53/111/121/181/211/233/248/308/316, 53/111/121/181/211/233/248/308/316/320, 53/86/111/121/169/181/211/233/248/308/316/320, or 53/77/79/86/111/121/169/170/181/211/233/234/248/308/316/320, wherein the amino acid positions are relative to the reference sequence corresponding to amino acid residues 12-321 of SEQ ID NO: 2, or relative to the reference sequence corresponding to SEQ ID NO: 2.

12. The engineered adenosine kinase of any one of claims 1-5 and 11, wherein the amino acid sequence of the engineered adenosine kinase comprises at least a substitution or substitution set 109R/111A, 104G/111A, 38C, 104A/111A, 104Y/111A, 40R, 111G, 109S/111A, 55H/316S, 109G/111A, 258V, 106E/111A, 104N/111A, 109T/111A, 109P/111A, 103Q/111A, 104D/111A, 104R/111A, 121F, 104S/111A, 104T/111A, 207R, 111A, 109E/111A, 103R/111A, 109L/111A, 104L/111A, 106P/111A, 316E, 43R, 103L/111A, 316S, 254P, 233S, 130A, 316D, 249G, 104P/111A, 104W/111A, 249S, 107T/111A, 106G/111A, 253P, 121H, 210E, 136H/249G, 208V, 34K, 107S/111A, 107G/111A, 211T, 308F, 181L, 233V, 107A/111A, 34R, 38V, 248R, 56S, 316K, 248V, 248K, 89T, 308V, 106R/111A, 67G, 111A/121H/233S/316S, 111A/121H/181L/211T/233S/248R/308L/316S, 53L/111A/121H/181L/211T/233S/248R/308L/316S, 53L/111A/121H/181L/211T/233S/248R/308L/316S/320S, 53L/86Q/111A/121H/169A/181L/211T/233S/248R/308L/316S/320S, or 53L/77V/79A/86Q/111A/121H/169A/170D/181L/211T/233S/234R/248R/308L/316S/320S, wherein the amino acid positions are relative to the reference sequence corresponding to amino acid residues 12-321 of SEQ ID NO: 2, or relative to the reference sequence corresponding to SEQ ID NO: 2.

13. The engineered adenosine kinase of any one of claims 1-5, wherein the amino acid sequence of the engineered adenosine kinase comprises at least one substitution set forth in Tables 7.1, 7.2, 8.1, 9.1, 10.2, 11.2, 12.2, 13.2, 14.2, 15.2, 16.2, 17.2, 18.2, 20.2, 21.2, 22.2, 23.2, 24.2, 25.2, 26.2, 27.2, 28.2, 29.2, 30.2, 31.2, 32.2, 33.2, 34.2, 35.2, 36.2, 37.2, 38.2, 39.2, 40.2, 41.2, 42.2, 43.2, 45.2, 46.2, 47.2, 48.2, 49.2 and 50.2, wherein the amino acid positions are relative to the reference sequence corresponding to amino acid residues 12-321 of SEQ ID NO: 2, or relative to the reference sequence corresponding to SEQ ID NO: 2.

14. The engineered adenosine kinase of any one of claims 1-5, wherein the amino acid sequence of the engineered adenosine kinase comprises at least a substitution or substitution set of an engineered adenosine kinase variant set forth in Tables 7.1, 7.2, 8.1, 9.1, 10.2, 11.2, 12.2, 13.2, 14.2, 15.2, 16.2, 17.2, 18.2, 20.2, 21.2, 22.2, 23.2, 24.2, 25.2, 26.2, 27.2, 28.2, 29.2, 30.2, 31.2, 32.2, 33.2, 34.2, 35.2, 36.2, 37.2, 38.2, 39.2, 40.2, 41.2, 42.2, 43.2, 45.2, 46.2, 47.2, 48.2, 49.2 and 50.2, wherein the amino acid positions are relative to the reference sequence corresponding to amino acid residues 12-321 of SEQ ID NO: 2, or relative to the reference sequence corresponding to SEQ ID NO: 2.

15. The engineered adenosine kinase of any one of claims 1-5, wherein the adenosine kinase comprises an amino acid sequence having at least 70%, 75%, 80%, 81%, 82%, 83%, 84%, 85%, 86%, 87%, 88%, 89%, 90%, 91%, 92%, 93%, 94%, 95%, 96%, 97%, 98%, 99% or more sequence identity to a reference amino acid sequence comprising a substitution or substitution set of an engineered adenosine kinase variant set forth in Tables 7.1, 7.2, 8.1, 9.1, 10.2, 11.2, 12.2, 13.2, 14.2, 15.2, 16.2, 17.2, 18.2, 20.2, 21.2, 22.2, 23.2, 24.2, 25.2, 26.2, 27.2, 28.2, 29.2, 30.2, 31.2, 32.2, 33.2, 34.2, 35.2, 36.2, 37.2, 38.2, 39.2, 40.2, 41.2, 42.2, 43.2, 45.2, 46.2, 47.2, 48.2, 49.2 and 50.2, wherein the amino acid positions are relative to the reference sequence corresponding to amino acid residues 12-321 of SEQ ID NO: 2, or relative to the reference sequence corresponding to SEQ ID NO: 2.

16. The engineered adenosine kinase of claim 1, comprising an amino acid sequence having at least 70%, 75%, 80%, 81%, 82%, 83%, 84%, 85%, 86%, 87%, 88%, 89%, 90%, 91%, 92%, 93%, 94%, 95%, 96%, 97%, 98%, 99%, or more sequence identity to the reference sequence corresponding to residues 12-321 of SEQ ID NO: 90, 254, 370, 734, 896, 1196, 1366, 1382, 1464, 1568, 1616, 1668, 1766, 1826, 1918, or 1942, or to the reference sequence corresponding to SEQ ID NO: 90, 254, 370, 734, 896, 1196, 1366, 1382, 1464, 1568, 1616, 1668, 1766, 1826, 1918, or 1942.

17. The engineered adenosine kinase of claim 1, comprising an amino acid sequence having at least 70%, 75%, 80%, 81%, 82%, 83%, 84%, 85%, 86%, 87%, 88%, 89%, 90%, 91%, 92%, 93%, 94%, 95%, 96%, 97%, 98%, 99%, or more sequence identity to a reference sequence corresponding to residues 12-321 of an even-numbered SEQ ID NO. of SEQ ID NOs: 4-1142, 1194-1808 and 1818-2124, or to a reference sequence corresponding to an even-numbered SEQ ID NO. of SEQ ID NOs: 4-1142, 1194-1808 and 1818-2124.

18. The engineered adenosine kinase of claim 1, comprising an amino acid sequence having at least 70%, 75%, 80%, 81%, 82%, 83%, 84%, 85%, 86%, 87%, 88%, 89%, 90%, 91%, 92%, 93%, 94%, 95%, 96%, 97%, 98%, 99%, or more sequence identity to the reference sequence corresponding to residues 12-321 of SEQ ID NO: 90, 254, 370, 734, 896, 1196, 1366, 1382, 1464, 1568, 1616, 1668, 1766, 1826, 1918, or 1942, or to the reference sequence corresponding to SEQ ID NO: 90, 254, 370, 734, 896, 1196, 1366, 1382, 1464, 1568, 1616, 1668, 1766, 1826, 1918, or 1942, wherein the amino acid sequence comprises one or more substitutions relative to the reference sequence corresponding to residues 12-321 of SEQ ID NO: 90, 254, 370, 734, 896, 1196, 1366, 1382, 1464, 1568, 1616, 1668, 1766, 1826, 1918, or 1942, or relative to the reference sequence corresponding to SEQ ID NO: 90, 254, 370, 734, 896, 1196, 1366, 1382, 1464, 1568, 1616, 1668, 1766, 1826, 1918, or 1942.

19. The engineered adenosine kinase of claim 1 or 1, comprising an amino acid sequence having at least 70%, 75%, 80%, 81%, 82%, 83%, 84%, 85%, 86%, 87%, 88%, 89%, 90%, 91%, 92%, 93%, 94%, 95%, 96%, 97%, 98%, 99%, or more sequence identity to the reference sequence corresponding to residues 12-321 of an even-numbered SEQ ID NO. of SEQ ID NOs: 4-1142, 1194-1808 and 1818-2124, or to the reference sequence corresponding to an even-numbered SEQ ID NO. of SEQ ID NOs: 4-1142, 1194-1808 and 1818-2124, wherein the amino acid sequence comprises one or more substitutions relative to the reference sequence corresponding to residues 12-321 of SEQ ID NO: 90, 254, 370, 734, 896, 1196, 1366, 1382, 1464, 1568, 1616, 1668, 1766, 1826, 1918, or 1942, or relative to the reference sequence corresponding to SEQ ID NO: 90, 254, 370, 734, 896, 1196, 1366, 1382, 1464, 1568, 1616, 1668, 1766, 1826, 1918, or 1942.

20. The engineered adenosine kinase of claim 18 or 19, wherein the amino acid sequence of the engineered adenosine kinase comprises at least a substitution at amino acid position 13, 14, 20, 21, 23, 24, 27, 29, 30, 31, 33, 34, 35, 38, 40, 41, 42, 43, 49, 50, 51, 52, 53, 54, 55, 56, 64, 67, 73, 74, 77, 79, 80, 83, 86, 87, 89, 90, 91, 92, 93, 94, 100, 101, 102, 103, 104, 106, 107, 108, 109, 111, 112, 113, 116, 119, 120, 121, 126, 128, 129, 130, 133, 134, 136, 141, 144, 146, 147, 151, 152, 155, 156, 157, 160, 162, 163, 164, 167, 168, 169, 170, 171, 172, 177, 180, 181, 182, 183, 185, 187, 188, 190, 191, 192, 194, 195, 196, 197, 202, 206, 207, 208, 210, 211, 215, 216, 217, 218, 221, 222, 225, 229, 231, 232, 233, 234, 236, 237, 238, 239, 240, 241, 242, 243, 244, 245, 246, 247, 248, 249, 250, 251, 252, 253, 254, 255, 256, 258, 265, 271, 276, 287, 288, 291, 292, 294, 295, 296, 299, 303, 305, 307, 308, 310, 311, 312, 314, 316, 317, or 320, or combinations thereof, wherein the amino acid positions are relative to the reference sequence corresponding to amino acid residues 12-321 of SEQ ID NO: 90, 254, 370, 734, 896, 1196, 1366, 1382, 1464, 1568, 1616, 1668, 1766, 1826, 1918, or 1942, or relative to the reference sequence corresponding to SEQ ID NO: 90, 254, 370, 734, 896, 1196, 1366, 1382, 1464, 1568, 1616, 1668, 1766, 1826, 1918, or 1942.

21. The engineered adenosine kinase of any one of claims 18-20, wherein the amino acid sequence of the engineered adenosine kinase comprises at least a substitution, or amino acid residue 13A/E/P, 14S/T/V, 20F/V, 21G, 23N, 241/N/V, 26F, 27A/C/G/K/P/R/S/W, 28L/M, 29G/R, 30G/Y, 31F/H/L/R/W/Y, 33A/P/Q/S, 34C/G/K/R, 35D/E/S/V/Y, 38C/R/V, 40H/M/R/W, 41L, 42D, 43E/K/R/S/V, 42G/N/Q, 46I, 49M, 50C, 51F/G/S, 52C/D/F/G/S/T, 53L/R, 54V, 55H, 56F/G/S/Y, 64M/T, 67G, 73A/C/E/M, 74F/I/K/R/T/V, 77V, 79A, 80M/S/V, 83F/L/S/T/V, 86L/Q, 87K, 89G/K/L/T, 90L/R/S/T/V, 91Y, 92M, 93A, 94M/N, 100G, 101F/W, 102I, 103L/Q/R, 104A/C/D/G/L/N/P/R/S/T/W/Y, 106E/G/L/M/P/R/T, 107A/G/H/S/T, 108A/C/E, 109E/G/L/P/R/S/T, 111A/G/L, 112I/L, 113G/S, 116M, 119C/G/M/Q/R/S/T/V, 120C, 121F/H/L/M/Q, 126A/L/S, 128F/V/W, 129A/G/S, 130A, 133A/L, 134H, 136F/H, 141S, 144Q/S, 146C/I, 147A/N/S, 151L, 152A/C, 155A/I/N/T/V/W, 156Y, 157P, 160L, 162F, 163G, 164A/G/K/Q/S/W, 167F/T/V/W, 168R/V, 169A/C/D/I/L/M/S, 170D/H/K/M/R/S/V, 171C/V, 172S, 177V, 179N, 180Q, 181A/C/L/M/V, 182G, 183M/S/V, 185S/T, 187H/Q/S/V, 188T, 190I, 191A/R/S/W, 192L, 194A/R, 195G/M/T/V, 196S, 197R, 202F, 206A/H, 207A/L/M/R/T/V, 208V, 210E/L, 211A/C/F/H/I/K/L/M/T/W, 21 IR, 212A, 215L, 216V, 217A/V, 218D/L/N/R/V, 221A, 222A/G/M/Q, 225E/G, 229C/H/V, 231L/M/V, 232S, 233A/S/V, 234A/M/N/R/V/Y, 236C/S/V, 237K/I/L/M/Q/V, 238L, 239A/F/G/H/I/M/Q/R/T/W, 240L/V, 241R, 242D/T, 243F/G/R/Y, 244R/W, 245F/Q/W, 246A/T/D/R/S/T/V, 247L, 248E/G/K/L/R/V, 249A/G/I/L/M/R/S, 250H/I/M/T, 251H/K/L/T/V, 252A/C/G/K/T/V, 253D/E/G/H/K/L/P/S/T/V, 254I/L/M/P/Q/T, 255A/C/E/G/I/K/S/W, 256C/H/M, 258R/S/V, 265Y, 271W, 274R, 275S, 276D/E/G/S, 287A/S/V/Y, 288V, 291G, 292F/I/K/V, 293M, 294L, 295A, 296N, 299G/S, 303D/F/H/M/S/V/W, 305S/T, 307F/G, 308D/F/L/V, 310A/C, 311E/F/G/L/M/Q/R/S/T, 312R, 314Q/S/V, 315S, 316A/D/E/I/K/S/Y, 317M/W/Y, or 320G/R/S, or combinations thereof, wherein the amino acid positions are relative to the reference sequence corresponding to amino acid residues 12-321 of SEQ ID NO: 90, 254, 370, 734, 896, 1196, 1366, 1382, 1464, 1568, 1616, 1668, 1766, 1826, 1918, or 1942, or relative to the reference sequence corresponding to SEQ ID NO: 90, 254, 370, 734, 896, 1196, 1366, 1382, 1464, 1568, 1616, 1668, 1766, 1826, 1918, or 1942.

22. The engineered adenosine kinase of any one of claims 18-20, wherein the amino acid sequence of the engineered adenosine kinase comprises at least a substitution at amino acid position 24, 27, 31, 40, 43, 51, 52, 74, 77, 79, 109, 113, 119, 121, 126, 129, 169, 181, 185, 207, 211, 233, 234, 237, 239, 244, 246, 249, 251, 252, 253, 276, 299, 305, 312, or 316, or combinations thereof, wherein the amino acid positions are relative to the reference sequence corresponding to amino acid residues 12-321 of SEQ ID NO: 90, 254, 370, 734, 896, 1196, 1366, 1382, 1464, 1568, 1616, 1668, 1766, 1826, 1918, or 1942, or relative to the reference sequence corresponding to SEQ ID NO: 90, 254, 370, 734, 896, 1196, 1366, 1382, 1464, 1568, 1616, 1668, 1766, 1826, 1918, or 1942.

23. The engineered adenosine kinase of any one of claims 18-20, and 22, wherein the amino acid sequence of the engineered adenosine kinase comprises at least a substitution or amino acid residue 241/N/V, 27A/C/G/K/P/R/S/W, 31F/H/L/R/W/Y, 40H/M/R/W, 43E/K/R/S/V, 51F/G/S, 52C/D/F/G/S/T, 74F/I/K/R/T/V, 77V, 79A, 109E/G/L/P/R/S/T, 113G/S, 119C/G/M/Q/R/S/T/V, 121F/H/L/M/Q, 126A/L/S, 129A/G/S, 169A/C/D/I/L/M/S, 181A/C/L/M/V, 185S/T, 207A/L/M/R/T/V, 211A/C/F/H/I/K/L/M/T/W, 233A/S/V, 234A/M/N/R/V/Y, 237K/I/L/M/Q/V, 239A/F/G/H/I/M/Q/R/T/W, 244R/W, 246A/D/R/S/T/V, 249A/G/I/L/M/R/S, 251H/K/L/T/V, 252A/C/G/K/T/V, 253D/E/G/H/K/L/P/S/T/V, 276D/E/G/S, 299G/S, 305S/T, 312R, or 316A/D/E/I/K/S/Y, or combinations thereof, wherein the amino acid positions are relative to the reference sequence corresponding to amino acid residues 12-321 of SEQ ID NO: 90, 254, 370, 734, 896, 1196, 1366, 1382, 1464, 1568, 1616, 1668, 1766, 1826, 1918, or 1942, or relative to the reference sequence corresponding to SEQ ID NO: 90, 254, 370, 734, 896, 1196, 1366, 1382, 1464, 1568, 1616, 1668, 1766, 1826, 1918, or 1942.

24. The engineered adenosine kinase of any one of claims 18-20, and 22, wherein the amino acid sequence of the engineered adenosine kinase comprises at least a substitution, or amino acid residue 24N, 27W, 31Y, 40R, 43R, 51F, 52D, 74R, 77V, 79A, 109S, 113G, 119M, 121H/Q, 126L, 129G/S, 169M, 181L/V, 185S, 207R, 211A/T, 233S, 234A, 237V, 239M, 244R, 246V, 249A, 251K, 252A/T, 253S, 276E, 299G, 305T, 312R, or 316D/Y, or combinations thereof, wherein the amino acid positions are relative to the reference sequence corresponding to amino acid residues 12-321 of SEQ ID NO: 90, 254, 370, 734, 896, 1196, 1366, 1382, 1464, 1568, 1616, 1668, 1766, 1826, 1918, or 1942, or relative to the reference sequence corresponding to SEQ ID NO: 90, 254, 370, 734, 896, 1196, 1366, 1382, 1464, 1568, 1616, 1668, 1766, 1826, 1918, or 1942.

25. The engineered adenosine kinase of claim 18, comprising an amino acid sequence having at least 70%, 75%, 80%, 81%, 82%, 83%, 84%, 85%, 86%, 87%, 88%, 89%, 90%, 91%, 92%, 93%, 94%, 95%, 96%, 97%, 98%, 99%, or more sequence identity to the reference sequence corresponding to residues 12-321 of SEQ ID NO: 90, or to the reference sequence corresponding to SEQ ID NO: 90, wherein the amino acid sequence comprises one or more substitutions relative to the reference sequence corresponding to residues 12-321 of SEQ ID NO: 90, or relative to the reference sequence corresponding to SEQ ID NO: 90.

26. The engineered adenosine kinase of claim 19, comprising an amino acid sequence having at least 70%, 75%, 80%, 81%, 82%, 83%, 84%, 85%, 86%, 87%, 88%, 89%, 90%, 91%, 92%, 93%, 94%, 95%, 96%, 97%, 98%, 99%, or more sequence identity to the reference sequence corresponding to residues 12-321 of an even-numbered SEQ ID NO. of SEQ ID NOs: 148-358, or to the reference sequence corresponding to an even-numbered SEQ ID NO. of SEQ ID NOs: 148-358, wherein the amino acid sequence comprises one or more substitutions relative to the reference sequence corresponding to residues 12-321 of SEQ ID NO: 90, or relative to the reference sequence corresponding to SEQ ID NO: 90.

27. The engineered adenosine kinase of claim 25 or 26 wherein the amino acid sequence of the engineered adenosine kinase comprises at least a substitution or substitution set at amino acid position(s) 111/233/316, 43/111/233/316, 109/181/316, 109/316, 111/233, 109/233/316, 38/208/211/308, 111/181/233/316, 109/111/233/316, 111/181/233/239/316, 111/233/239/316, 109/111/181/233/316, 111/181/316, 43/233, 109/111/316, 181/233, 34/211/248/249, 34/38/248/249, 34/308, 233/316, 43/233/316, 181/316, 34/249, 43/181/233/316, 34/38/103/116/253, 34, 40/43/109/181/233/316, 34/38/208/253, 103/249/253/308, 34/38/116/208, 38/249, 34/38/116/211/248/253/308, 43/109/316, 116/253, 43/111/181/316, 34/38/308, 109/111/181, 111/130/233, 233, 34/38/116/308, 109/233, 40/43/109/111/181/233/316, 109/130/181/233, 34/38/253, 253, 34/38/103/208/249, 103/208/210/253, 130/181/233/316, 109/111/130/181/233, 34/38/210/211/253/303, 103/116/208, 34/116/248/252/253, 34/38/103/210/211/249, 40/233/316, 34/38, 109/130/233, 111/130/181/233/316, 34/38/249/253, 34/38/208/248, 40/109/111/181/233/316, 130/316, 40/316, 38/116, 34/38/116, 38/116/208/210/249/253, 40/130/181/233/316, 103/248/249, or 103/248, wherein the amino acid positions are relative to the reference sequence corresponding to amino acid residues 12-321 of SEQ ID NO: 90, or relative to the reference sequence corresponding to SEQ ID NO: 90.

28. The engineered adenosine kinase of any one of claims 25-27, wherein the amino acid sequence of the engineered adenosine kinase comprises at least a substitution set or amino acid residues 111A/233S/316S, 111A/233S/316E, 43R/111A/233S/316S, 109S/181L/316S, 109S/316E, 111A/233S, 109S/233S/316E, 38C/208V/211T/308F, 111A/181L/233S/316S, 109S/111A/233S/316S, 111A/181L/233S/239Q/316S, 111A/233S/239Q/316S, 109S/111A/181L/233S/316S, 111A/181L/316E, 43R/233S, 109S/111A/316S, 181L/233S, 34K/211T/248R/249G, 34K/38C/248R/249G, 34K/308F, 233S/316E, 43R/233S/316D, 181L/316S, 34R/249G, 43R/233S/316S, 43R/181L/233S/316S, 34R/38C/103R/116M/253P, 34K, 40R/43R/109S/181L/233S/316D, 34R/38C/208V/253P, 103R/249G/253P/308F, 34R/38C/116M/208V, 38C/249G, 34K/38C/116M/211T/248R/253P/308L, 43R/109S/316S, 116M/253P, 109S/111A/233S/316D, 43R/111A/181L/316E, 34R/38C/308F, 109S/111A/181L, 111A/130A/233S, 233S, 34R/38C/116M/308F, 109S/233S, 40R/43R/109S/111A/181L/233S/316S, 109S/130A/181L/233S, 34K/38C/253P, 253P, 34R/38C/103R/208V/249S, 103R/208V/210E/253P, 130A/181L/233S/316D, 109S/111A/130A/181L/233S, 34R/38C/210E/211T/253P/303H, 103R/116M/208V, 34R/116M/248R/252K/253P, 34R/38C/103R/210E/211T/249G, 40R/233S/316S, 34R/38C, 109S/130A/233S, 111A/130A/181L/233S/316S, 34K/38C/249G/253P, 34K/38C/208V/248R, 40R/109S/111A/181L/233S/316S, 130A/316S, 40R/316S, 38C/116M, 34K/38C/116M, 38C/116M/208V/210E/249G/253P, 40R/130A/181L/233S/316D, 34R/38C/116M, 34R/38C/253P, 130A/316D, 103R/248R/249G, or 103R/248R, wherein the amino acid positions are relative to the reference sequence corresponding to residues 12-321 of SEQ ID NO: 90, or relative to the reference sequence corresponding to SEQ ID NO: 90.

29. The engineered adenosine kinase of claim 18, comprising an amino acid sequence having at least 70%, 75%, 80%, 81%, 82%, 83%, 84%, 85%, 86%, 87%, 88%, 89%, 90%, 91%, 92%, 93%, 94%, 95%, 96%, 97%, 98%, 99%, or more sequence identity to the reference sequence corresponding to residues 12-321 of SEQ ID NO: 254, or to the reference sequence corresponding to SEQ ID NO: 254, wherein the amino acid sequence comprises one or more substitutions relative to the reference sequence corresponding to residues 12-321 of SEQ ID NO: 254, or relative to the reference sequence corresponding to SEQ ID NO: 254.

30. The engineered adenosine kinase of claim 19, comprising an amino acid sequence having at least 70%, 75%, 80%, 81%, 82%, 83%, 84%, 85%, 86%, 87%, 88%, 89%, 90%, 91%, 92%, 93%, 94%, 95%, 96%, 97%, 98%, 99%, or more sequence identity to the reference sequence corresponding to residues 12-321 of an even-numbered SEQ ID NO. of SEQ ID NOs: 360-592, or to the reference sequence corresponding to an even-numbered SEQ ID NO. of SEQ ID NOs: 360-592, wherein the amino acid sequence comprises one or more substitutions relative to the reference sequence corresponding to residues 12-321 of SEQ ID NO: 254, or relative to the reference sequence corresponding to SEQ ID NO: 254.

31. The engineered adenosine kinase of claim 29 or 30, wherein the amino acid sequence of the engineered adenosine kinase comprises at least a substitution or substitution set at amino acid position(s) 77/111/170/211/236, 77/111/211, 77/211, 53/77/170/211/320, 53/77/211/234/320, 77/79/211/316, 77/111/234/236/308, 111/170/211/234/236/248, 111/169/170/234/236/248, 77/211/248/320, 53/169/170/234/320, 111/211/234/236/248, 77, 53/77/111/170/248, 211/234/248, 77/86/170/211/234/308/320, 77/86, 53/111/170, 77/79/111, 53/77/111/169/236, 77/211/234, 211, 53/77, 86/169/234, 53/211/234/248, 111/169/170/236/248, 77/79/211, 77/79/169/170, 77/79/86/169/236, 79/211/248, 79/211, 53/86/211/234/236, 79/170/211, 308, 53/211, 169/234/236, 77/79/169/234/236, 53/77/79, 77/111, 53/234/236, 169/170, 53/77/79/169, 53/86/234/236, 53/169/234/236, 53/234, 77/79/86/170/211/234/236/308/320, 53/170, 77/248, 53/86, 252, 180, 129, 121, 255, 119, 256, 237, 249, 20, 234, 254, 56, 287, 317, 299, 229, 250, 295, 144/255, 291, 181, 233, 248, 231, 251, 128, 156, 247, 288, or 292, wherein the amino acid positions are relative to the reference sequence corresponding to residues 12-321 of SEQ ID NO: 254, or relative to the reference sequence corresponding to SEQ ID NO: 254.

32. The engineered adenosine kinase of any one of claims 29-31, wherein the amino acid sequence of the engineered adenosine kinase comprises at least a substitution or substitution set 77V/111A/170D/211T/236V, 77V/111A/211T, 77V/211T, 53L/77V/170D/211T/320S, 53L/77V/211T/234R/320S, 77V/79A/211T/316Y, 77V/111A/234R/236V/308L, 111A/170D/211T/234R/236V/248R, 111A/169A/170D/234R/236V/248R, 77V/211T/248R/320S, 53L/169A/170D/234R/320S, 111A/211T/234R/236V/248R, 77V, 53L/77V/111A/170D/248R, 211T/234R/248R, 77V/86Q/170D/211T/234R/308L/320S, 77V/86Q, 53L/111A/170D, 77V/79A/111A, 53L/77V/111A/169A/236V, 77V/211T/234R, 211T, 53L/77V, 86Q/169A/234R, 53L/211T/234R/248R, 111A/169A/170D/236V/248R, 77V/79A/211T, 77V/79A/169A/170D, 77V/79A/86Q/169A/236V, 79A/211T/248R, 79A/21 IT, 53L/86Q/211T/234R/236V, 79A/170D/211T, 308L, 53L/21 IT, 169A/234R/236V, 77V/79A/169A/234R/236V, 53L/77V/79A, 77V/111A, 53L/234R/236V, 169A/170D, 53L/77V/79A/169A, 53L/86Q/234R/236V, 53L/169A/234R/236V, 53L/234R, 77V/79A/86Q/170D/211T/234R/236V/308L/320S, 53L/170D, 77V/248R, 53L/86Q, 252T, 180Q, 129G, 121M, 255A, 255S, 121L, 255E, 119M, 256C, 255G, 237I, 249L, 20F, 255K, 237V, 234A, 254Q, 256M, 56Y, 56F, 249M, 119T, 287V, 121F, 119S, 252K, 56G, 317W, 119V, 299S, 229C, 119C, 250I, 254L, 234M, 229V, 234Y, 287Y, 295A, 144Q/255W, 119Q, 291G, 250T, 181M, 287S, 119R, 317Y, 119G, 250M, 249G, 249I, 20V, 237M, 233A, 248G, 231V, 251L, 128F, 287A, 181V, 156Y, 247L, 288V, 292K, 181A, 249R, or 250H, wherein the amino acid positions are relative to the reference sequence corresponding to residues 12-321 of SEQ ID NO: 254, or relative to the reference sequence corresponding to SEQ ID NO: 254.

33. The engineered adenosine kinase of claim 18, comprising an amino acid sequence having at least 70%, 75%, 80%, 81%, 82%, 83%, 84%, 85%, 86%, 87%, 88%, 89%, 90%, 91%, 92%, 93%, 94%, 95%, 96%, 97%, 98%, 99%, or more sequence identity to the reference sequence corresponding to residues 12-321 of SEQ ID NO: 370, or to the reference sequence corresponding to SEQ ID NO: 370, wherein the amino acid sequence comprises one or more substitutions relative to the reference sequence corresponding to residues 12-321 of SEQ ID NO: 370, or relative to the reference sequence corresponding to SEQ ID NO: 370.

34. The engineered adenosine kinase of claim 19, comprising an amino acid sequence having at least 70%, 75%, 80%, 81%, 82%, 83%, 84%, 85%, 86%, 87%, 88%, 89%, 90%, 91%, 92%, 93%, 94%, 95%, 96%, 97%, 98%, 99%, or more sequence identity to the reference sequence corresponding to residues 12-321 of an even-numbered SEQ ID NO. of SEQ ID NOs: 594-888, or to the reference sequence corresponding to an even-numbered SEQ ID NO. of SEQ ID NOs: 594-888, wherein the amino acid sequence comprises one or more substitutions relative to the reference sequence corresponding to residues 12-321 of SEQ ID NO: 370, or relative to the reference sequence corresponding to SEQ ID NO: 370.

35. The engineered adenosine kinase of claim 33 or 34, wherein the amino acid sequence of the engineered adenosine kinase comprises at least a substitution or substitution set at amino acid position(s) 299, 21, 113, 152, 169/255, 251, 294, 255, 202/211, 31, 129, 252, 27/64, 128, 248, 234, 288, 20, 111, 112, 181, 119, 64, 155, 256, 254, 292, 265, 177, 232, 120, 183, 234/252, 181/250/252/299, 119/181/234/250/299, 129/234/252, 119/129/234, 119/181/234/250/256/299, 119/181/250/252, 119/181/234/299, 234/250/252, 119/181/252/299, 129/181/234/299, 56/121/229, 181/255/299, 119/299, 119/250/255/299, 80/119/252, 119/129, 119/129/250, 181/234/252/299, 181/250/299, 252/299, 119/181/299, 119/129/299, 119/129/234/252, 119/129/234/250/299, 119/181/234/252, 129/234/255/299, 181/299, 250/252, 250/255/299, 119/234/299, 119/181/250, 56/237, 250/299, 119/234/255/256/299, 56/229/254, 119/129/181, 56/121/295/317, 119/181/250/255/256, 229, 250, 119/234, 20/229/237/317, 181/250, 119/255, 121/156/229, 56/121/237, 237/317, 56/295, 56/121/229/236/254/295, 56/254, 119/250/299, 229/237/295, 20/229/317, 229/295, 156/229, 56/121/229/237/295, 237/254, 20/56, 56/156, 56/156/254/295, 20/56/229, 119/129/181/234, 237, 56/156/229/237, 20/56/102/229, 119/181/234, 20/229, 56/121/156/237, 56/156/229, 20/56/156/229/237/295, 20/56/121/237/317, 156, 156/237/295, 20/56/121, 119/181, 20/56/229/254, 56, 121/254, 20/295, 255/256, 56/121/229/254, or 119/129/234/255/256, wherein the amino acid positions are relative to the reference sequence corresponding to residues 12-321 of SEQ ID NO: 370, or relative to the reference sequence corresponding to SEQ ID NO: 370.

36. The engineered adenosine kinase of any one of claims 33-35, wherein the amino acid sequence of the engineered adenosine kinase comprises at least a substitution or substitution set 299G, 21G, 299S, 113S, 152C, 169D/255C, 251K, 294L, 255S, 202F/211A, 31L, 129A, 252V, 27A/64M, 128W, 248L, 251V, 234V, 288V, 20V, 111L, 112L, 181C, 119C, 64T, 251T, 155W, 256H, 128F, 254I, 248G, 292F, 252C, 234N, 181A, 31W, 265Y, 251L, 152A, 234M, 177V, 232S, 120C, 31F, 183M, 234A/252T, 181V/250I/252T/299S, 119R/181V/234A/250I/299S, 129G/234A/252T, 119M/129G/234A, 119M/181V/234A/250I/256M/299S, 119R/181V/250I/252T, 119M/181V/234A/299S, 234A/250I/252T, 119R/181V/252T/299S, 129G/181V/234A/299S, 56G/121L/229V, 181V/255A/299S, 119M/299S, 119R/250I/255K/299S, 119R/181V/234A/299S, 252T, 80M/119M/252T, 119M/129G, 119M/129G/250I, 181V/234A/252T/299S, 181V/250I/299S, 252T/299S, 119M/181V/299S, 119R/129G/299S, 119M/129G/234A/252T, 119M/129G/234A/250I/299S, 119M/181V/234A/252T, 129G/234A/255K/299S, 181V/299S, 250I/252T, 250I/255K/299S, 119R/181V/299S, 119M/234A/299S, 119R/299S, 119M/181V/250I, 129G, 56G/237V, 250I/299S, 119M/234A/255K/256M/299S, 56G/229V/254L, 119R/129G/181V, 56G/121M/295A/317Y, 119R/181V/250I/255A/256M, 229V, 250I, 119M, 119M/234A, 20F/229V/237V/317Y, 181V/250I, 119M/255K, 121M/156Y/229V, 56G/121M/237V, 237V/317Y, 56G/295A, 56G/121M/229V/236S/254L/295A, 56G/254L, 119R/250I/299S, 229V/237V/295A, 20F/229V/317Y, 234A, 119R/234A, 254L, 229V/295A, 156Y/229V, 56F/121M/229V/237V/295A, 56F/237V, 237V/254L, 299S, 20F/56G, 56G/156Y, 56G/156Y/254L/295A, 20F/56G/229V, 119M/129G/181V/234A, 237V, 20F, 56F/156Y/229V/237V, 56F/254L, 20F/56G/102I/229V, 20F/56F, 256M, 119M/181V/234A, 20F/229V, 56F/121M/156Y/237V, 56F/156Y/229V, 20F/56G/156Y/229V/237V/295A, 56F/229V/254L, 20F/56F/121M/237V/317Y, 20F/56F/229V, 119R/181V/234A, 119R, 156Y, 156Y/237V/295A, 20F/56F/121M, 119M/181V, 20F/56G/229V/254L, 56F, 121M/254L, 20F/295A, 255K/256M, 56F/121M/229V/254L, 119M/129G/234A/255A/256M, or 119R/181V, wherein the amino acid positions are relative to the reference sequence corresponding to residues 12-321 of SEQ ID NO: 370, or relative to the reference sequence corresponding to SEQ ID NO: 370.

37. The engineered adenosine kinase of claim 18, comprising an amino acid sequence having at least 70%, 75%, 80%, 81%, 82%, 83%, 84%, 85%, 86%, 87%, 88%, 89%, 90%, 91%, 92%, 93%, 94%, 95%, 96%, 97%, 98%, 99%, or more sequence identity to the reference sequence corresponding to residues 12-321 of SEQ ID NO: 734, or to the reference sequence corresponding to SEQ ID NO: 734, wherein the amino acid sequence comprises one or more substitutions relative to the reference sequence corresponding to residues 12-321 of SEQ ID NO: 734, or relative to the reference sequence corresponding to SEQ ID NO: 734.

38. The engineered adenosine kinase of claim 19, comprising an amino acid sequence having at least 70%, 75%, 80%, 81%, 82%, 83%, 84%, 85%, 86%, 87%, 88%, 89%, 90%, 91%, 92%, 93%, 94%, 95%, 96%, 97%, 98%, 99%, or more sequence identity to the reference sequence corresponding to residues 12-321 of an even-numbered SEQ ID NO. of SEQ ID NOs: 890-1142, 1192 and 1194, or to the reference sequence corresponding to an even-numbered SEQ ID NO. of SEQ ID NOs: 890-1142, 1192 and 1194, wherein the amino acid sequence comprises one or more substitutions relative to the reference sequence corresponding to residues 12-321 of SEQ ID NO: 734, or relative to the reference sequence corresponding to SEQ ID NO: 734.

39. The engineered adenosine kinase of claim 37 or 38, wherein the amino acid sequence of the engineered adenosine kinase comprises at least a substitution or substitution set at amino acid position(s) 56/229, 21/56, 181, 181/211/251, 181/211, 21/121/299, 229, 56, 56/169, 311, 52, 170, 31/181/211, 167, 303, 222, 43, 83, 113/181/211, 251, 187, 218, 181/251, 195, 121/229, 107, 141, 31/181, 307, 100, 169, 86, 90, 164, 310, 276, 35, 56/134, 211, 50, 41, 121/169/229, 74, 225, 106, 121, 31/113/181, 191, 190, 171, 168, 31/181/211/294, 73, 31/251, 31, 196, 89, 197, 242, 51, 103, 101, 147, 40, 146, 243, 56/121/229, or 31/211, wherein the amino acid positions are relative to the reference sequence corresponding to residues 12-321 of SEQ ID NO: 734, or relative to the reference sequence corresponding to SEQ ID NO: 734.

40. The engineered adenosine kinase of any one of claims 37-39, wherein the amino acid sequence of the engineered adenosine kinase comprises at least a substitution or substitution set, or amino acid residue(s) 56G/229V, 21G/56G, 181V, 181V/211A/251K, 181V/211A, 21G/121L/299S, 229V, 56G, 56G/169D, 311Q, 52D, 170R, 31L/181V/211A, 167W, 170H, 303M, 222G, 43V, 83V, 113S/181V/211A, 251K, 187V, 218V, 181V/251K, 195T, 121L/229V, 107H, 141S, 31L/181V, 307F, 100G, 169L, 169M, 52G, 86L, 90L, 311G, 164W, 310C, 167F, 276E, 35V, 56G/134H, 211M, 211M, 170V, 50C, 41L, 311S, 121L/169D/229V, 74I, 225G, 106G, 121L, 31L/113S/181V, 191A, 191S, 211I, 35S, 190I, 164K, 171C, 211F, 211L, 225E, 195G, 311R, 167V, 311L, 168V, 168R, 211C, 31L/181V/211A/294L, 73M, 276S, 74V, 164S, 31L/251K, 169S, 31L, 169D, 196S, 196S, 52C, 218L, 169C, 89G, 90R, 73E, 73E, 167T, 197R, 242D, 51S, 103L, 191R, 101F, 83T, 52F, 164G, 195M, 43K, 147S, 187Q, 311M, 40W, 169I, 242T, 101W, 83L, 222M, 170S, 311F, 146I, 83S, 243R, 74T, 311T, 218N, 74F, 303V, 83F, 90V, 74K, 303F, 310A, 243G, 222A, 43S, 303W, 56G/121L/229V, or 31L/211A, wherein the amino acid positions are relative to the reference sequence corresponding to residues 12-321 of SEQ ID NO: 734, or relative to the reference sequence corresponding to SEQ ID NO: 734.

41. The engineered adenosine kinase of claim 18, comprising an amino acid sequence having at least 70%, 75%, 80%, 81%, 82%, 83%, 84%, 85%, 86%, 87%, 88%, 89%, 90%, 91%, 92%, 93%, 94%, 95%, 96%, 97%, 98%, 99%, or more sequence identity to the reference sequence corresponding to residues 12-321 of SEQ ID NO: 896, or to the reference sequence corresponding to SEQ ID NO: 896, wherein the amino acid sequence comprises one or more substitutions relative to the reference sequence corresponding to residues 12-321 of SEQ ID NO: 896, or relative to the reference sequence corresponding to SEQ ID NO: 896.

42. The engineered adenosine kinase of claim 19, comprising an amino acid sequence having at least 70%, 75%, 80%, 81%, 82%, 83%, 84%, 85%, 86%, 87%, 88%, 89%, 90%, 91%, 92%, 93%, 94%, 95%, 96%, 97%, 98%, 99%, or more sequence identity to the reference sequence corresponding to residues 12-321 of an even-numbered SEQ ID NO. of SEQ ID NOs: 1196-1344, or to the reference sequence corresponding to an even-numbered SEQ ID NO. of SEQ ID NOs: 1196-1344, wherein the amino acid sequence comprises one or more substitutions relative to the reference sequence corresponding to residues 12-321 of SEQ ID NO: 896, or relative to the reference sequence corresponding to SEQ ID NO: 896.

43. The engineered adenosine kinase of claim 41 or 42, wherein the amino acid sequence of the engineered adenosine kinase comprises at least a substitution or substitution set at amino acid position(s) 52/169, 52/141/169, 52, 41, 169, 51/52/211, 52/141/187, 51/52, 141, 41/103, 311, 167, 41/311, 133, 207, 14, 34, 241, 33, 27, 206, 217, 239, 13, 246, 162, 108, 160, 245, 92, 163, 104, 157, 215, 80, 54, 240, 210, 23, 53, 87, 188, 151, 29, 258, 238, 244, 192, 91, or 30, wherein the amino acid positions are relative to the reference sequence corresponding to residues 12-321 of SEQ ID NO: 896, or relative to the reference sequence corresponding to SEQ ID NO: 896.

44. The engineered adenosine kinase of any one of claims 41-43, wherein the amino acid sequence of the engineered adenosine kinase comprises at least a substitution or substitution set, or amino acid residue(s) 52D/169M, 52D/141S/169M, 52G, 52G/169M, 52D, 41L, 52G/141S/169M, 169M, 51S/52G/211M, 52G/141S/187V, 51S/52D, 141S, 41L/103L, 311Q, 167F, 41L/311Q, 51S/52G, 133L, 207R, 14V, 34R, 241R, 33Q, 27S, 206A, 217V, 239R, 207T, 13A, 246T, 13P, 207M, 162F, 207L, 27P, 108C, 160L, 33S, 245W, 239F, 92M, 163G, 239T, 104C, 157P, 215L, 80V, 54V, 239A, 13E, 207V, 240V, 133A, 210L, 207A, 23N, 53R, 87K, 188T, 151L, 29R, 258S, 34G, 238L, 27R, 14S, 244W, 192L, 91Y, 206H, 30Y, 80S, 258R, 240L, or 104L, wherein the amino acid positions are relative to the reference sequence corresponding to residues 12-321 of SEQ ID NO: 896, or relative to the reference sequence corresponding to SEQ ID NO: 896.

45. The engineered adenosine kinase of claim 18, comprising an amino acid sequence having at least 70%, 75%, 80%, 81%, 82%, 83%, 84%, 85%, 86%, 87%, 88%, 89%, 90%, 91%, 92%, 93%, 94%, 95%, 96%, 97%, 98%, 99%, or more sequence identity to the reference sequence corresponding to residues 12-321 of SEQ ID NO: 1196, or to the reference sequence corresponding to SEQ ID NO: 1196, wherein the amino acid sequence comprises one or more substitutions relative to the reference sequence corresponding to residues 12-321 of SEQ ID NO: 1196, or relative to the reference sequence corresponding to SEQ ID NO: 1196.

46. The engineered adenosine kinase of claim 19, comprising an amino acid sequence having at least 70%, 75%, 80%, 81%, 82%, 83%, 84%, 85%, 86%, 87%, 88%, 89%, 90%, 91%, 92%, 93%, 94%, 95%, 96%, 97%, 98%, 99%, or more sequence identity to the reference sequence corresponding to residues 12-321 of an even-numbered SEQ ID NO. of SEQ ID NOs: 1346-1364, or to the reference sequence corresponding to an even-numbered SEQ ID NO. of SEQ ID NOs: 1346-1364, wherein the amino acid sequence comprises one or more substitutions relative to the reference sequence corresponding to residues 12-321 of SEQ ID NO: 1196, or relative to the reference sequence corresponding to SEQ ID NO: 1196.

47. The engineered adenosine kinase of claim 45 or 46, wherein the amino acid sequence of the engineered adenosine kinase comprises at least a substitution or substitution set at amino acid position(s) 24, 234/236, 251/252, 119, 234, or 231/234, wherein the amino acid positions are relative to the reference sequence corresponding to residues 12-321 of SEQ ID NO: 1196, or relative to the reference sequence corresponding to SEQ ID NO: 1196.

48. The engineered adenosine kinase of any one of claims 45-47, wherein the amino acid sequence of the engineered adenosine kinase comprises at least a substitution or substitution set, or amino acid residue(s) 24V, 241, 234K/236C, 24N, 251H/252A, 119S, 119T, 234K, 234K/236S, or 231L/234K, wherein the amino acid positions are relative to the reference sequence corresponding to residues 12-321 of SEQ ID NO: 1196, or relative to the reference sequence corresponding to SEQ ID NO: 1196.

49. The engineered adenosine kinase of claim 18 comprising an amino acid sequence having at least 70%, 75%, 80%, 81%, 82%, 83%, 84%, 85%, 86%, 87%, 88%, 89%, 90%, 91%, 92%, 93%, 94%, 95%, 96%, 97%, 98%, 99%, or more sequence identity to the reference sequence corresponding to residues 12-321 of SEQ ID NO: 1366, or to the reference sequence corresponding to SEQ ID NO: 1366, wherein the amino acid sequence comprises one or more substitutions relative to the reference sequence corresponding to residues 12-321 of SEQ ID NO: 1366, or relative to the reference sequence corresponding to SEQ ID NO: 1366.

50. The engineered adenosine kinase of claim 19, comprising an amino acid sequence having at least 70%, 75%, 80%, 81%, 82%, 83%, 84%, 85%, 86%, 87%, 88%, 89%, 90%, 91%, 92%, 93%, 94%, 95%, 96%, 97%, 98%, 99%, or more sequence identity to the reference sequence corresponding to residues 12-321 of an even-numbered SEQ ID NO. of SEQ ID NOs: 1366-1410, or to the reference sequence corresponding to an even-numbered SEQ ID NO. of SEQ ID NOs: 1366-1410, wherein the amino acid sequence comprises one or more substitutions relative to the reference sequence corresponding to residues 12-321 of SEQ ID NO: 1366, or relative to the reference sequence corresponding to SEQ ID NO: 1366.

51. The engineered adenosine kinase of claim 49 or 50, wherein the amino acid sequence of the engineered adenosine kinase comprises at least a substitution or substitution set at amino acid position(s) 182, 121, 249, 129, 152, 237, 155, 121/129/207/237/249, 121/129/207/249, 27/121/207, 27/121/207/249, 121/207, 121/237, 121/249, 121/207/252, 27/121/129/207, 27/121/129/237, 207, 182/207, 121/129, or 121/237/252, wherein the amino acid positions are relative to the reference sequence corresponding to residues 12-321 of SEQ ID NO: 1366, or relative to the reference sequence corresponding to SEQ ID NO: 1366.

52. The engineered adenosine kinase of any one of claims 49-51, wherein the amino acid sequence of the engineered adenosine kinase comprises at least a substitution or substitution set, or amino acid residue(s) 182G, 121Q, 249A, 129S, 152A, 237V, 155A, 121Q/129S/207R/237V/249A, 121Q/129S/207R/249A, 27P/121Q/207R, 27P/121Q/207R/249A, 121Q/207R, 121Q/237V, 121Q/249A, 121Q/207R/252V, 27P/121Q/129S/207R, 27P/121Q/129S/237V, 207R, 182G/207R, 121Q/129S, 121Q/237V/252V, or 155I, wherein the amino acid positions are relative to the reference sequence corresponding to residues 12-321 of SEQ ID NO: 1366, or relative to the reference sequence corresponding to SEQ ID NO: 1366.

53. The engineered adenosine kinase of claim 18, comprising an amino acid sequence having at least 70%, 75%, 80%, 81%, 82%, 83%, 84%, 85%, 86%, 87%, 88%, 89%, 90%, 91%, 92%, 93%, 94%, 95%, 96%, 97%, 98%, 99%, or more sequence identity to the reference sequence corresponding to residues 12-321 of SEQ ID NO: 1382, or to the reference sequence corresponding to SEQ ID NO: 1382, wherein the amino acid sequence comprises one or more substitutions relative to the reference sequence corresponding to residues 12-321 of SEQ ID NO: 1382, or relative to the reference sequence corresponding to SEQ ID NO: 1382.

54. The engineered adenosine kinase of claim 19, comprising an amino acid sequence having at least 70%, 75%, 80%, 81%, 82%, 83%, 84%, 85%, 86%, 87%, 88%, 89%, 90%, 91%, 92%, 93%, 94%, 95%, 96%, 97%, 98%, 99%, or more sequence identity to the reference sequence corresponding to residues 12-321 of an even-numbered SEQ ID NO. of SEQ ID NOs: 1412-1564, or to the reference sequence corresponding to an even-numbered SEQ ID NO. of SEQ ID NOs: 1412-1564, wherein the amino acid sequence comprises one or more substitutions relative to the reference sequence corresponding to residues 12-321 of SEQ ID NO: 1382, or relative to the reference sequence corresponding to SEQ ID NO: 1382.

55. The engineered adenosine kinase of claim 53 or 54, wherein the amino acid sequence of the engineered adenosine kinase comprises at least a substitution or substitution set at amino acid position(s) 314, 221, 170, 40, 49, 73, 194, 195, 147, 218, 216, 90, 89, 42, 211, 106, 171, 93, 296, 100, 243, 172, 51, 271, 90/171/191, 90/271, 90/191, 90/147/171/271, 191, 51/90, 187/211, 171/191, 170/211, 49/51, 51/171/191/271, 40/211, 106/187/211, 211/221, 40/170/211, 49/51/90/147/171, 51/90/171, 51/171, 49/51/191, 49/51/90/147, 49/51/171/271, 106/211/221, 187/221, 49/171/191/314, 51/191/271, 51/90/171/191/271, 52/221, 90/171/191/271, 191/271, 170/221, 50/52, 50/52/106/211, 50/211/308, 50/52/106, 40/50/187/211/308, 50/52/106/170/187/308, 40/52/170, 50/106, 50/221/308, 49/51/90/271, 40/52/170/211, 187, 50/211/221/308, or 40/50/52/221, wherein the amino acid positions are relative to the reference sequence corresponding to residues 12-321 of SEQ ID NO: 1382, or relative to the reference sequence corresponding to SEQ ID NO: 1382.

56. The engineered adenosine kinase of any one of claims 53-55, wherein the amino acid sequence of the engineered adenosine kinase comprises at least a substitution or substitution set, or amino acid residue(s) 314S, 221A, 170K, 40H, 314V, 49M, 73C, 314Q, 194A, 195V, 147N, 218L, 216V, 90S, 89L, 42D, 211H, 90T, 106M, 171C, 93A, 296N, 100G, 243Y, 172S, 73A, 51F, 271W, 90S/171V/191W, 90S/271W, 90S/191W, 90S/147A/171V/271W, 191W, 51F/90S, 187H/211W, 171C/191W, 170M/211K, 49M/51G, 51G/171C/191W/271W, 40M/211K, 106T/187H/211K, 211W/221A, 40M/170M/211K, 211W, 49M/51G/90S/147A/171V, 51G/90S/171V, 51G/171V, 49M/51F/191W, 49M/51G/90S/147A, 51G, 49M/51F/171V/271W, 49M/51F/171C/271W, 106T/211K/221A, 211K, 187H/221A, 49M/171C/191W/314S, 51G/191W/271W, 51G/90S/171C/191W/271W, 52T/221A, 90S/171C/191W/271W, 191W/271W, 170M/221A, 50C/52T, 50C/52T/106T/211W, 50C/211K/308D, 50C/52S/106T, 40M, 40M/50C/187H/211K/308D, 50C/52T/106T/170M/187H/308D, 40M/52T/170M, 50C/106T, 50C/221A/308D, 49M/51F/90S/271W, 40M/52S/170M/211W, 187H, 50C/211K/221A/308D, or 40M/50C/52S/221A, wherein the amino acid positions are relative to the reference sequence corresponding to residues 12-321 of SEQ ID NO: 1382, or relative to the reference sequence corresponding to SEQ ID NO: 1382.

57. The engineered adenosine kinase of claim 18, comprising an amino acid sequence having at least 70%, 75%, 80%, 81%, 82%, 83%, 84%, 85%, 86%, 87%, 88%, 89%, 90%, 91%, 92%, 93%, 94%, 95%, 96%, 97%, 98%, 99%, or more sequence identity to the reference sequence corresponding to residues 12-321 of SEQ ID NO: 1464, or to the reference sequence corresponding to SEQ ID NO: 1464, wherein the amino acid sequence comprises one or more substitutions relative to the reference sequence corresponding to residues 12-321 of SEQ ID NO: 1464, or relative to the reference sequence corresponding to SEQ ID NO: 1464.

58. The engineered adenosine kinase of claim 19, comprising an amino acid sequence having at least 70%, 75%, 80%, 81%, 82%, 83%, 84%, 85%, 86%, 87%, 88%, 89%, 90%, 91%, 92%, 93%, 94%, 95%, 96%, 97%, 98%, 99%, or more sequence identity to the reference sequence corresponding to residues 12-321 of an even-numbered SEQ ID NO. of SEQ ID NOs: 1566-1578, or to the reference sequence corresponding to an even-numbered SEQ ID NO. of SEQ ID NOs: 1566-1578, wherein the amino acid sequence comprises one or more substitutions relative to the reference sequence corresponding to residues 12-321 of SEQ ID NO: 1464, or relative to the reference sequence corresponding to SEQ ID NO: 1464.

59. The engineered adenosine kinase of claim 57 or 58, wherein the amino acid sequence of the engineered adenosine kinase comprises at least a substitution or amino acid residue 317M, 113G, 21G, 155V, 126S, 155N, or 231M, or combinations thereof, wherein the amino acid positions are relative to the reference sequence corresponding to residues 12-321 of SEQ ID NO: 1464, or relative to the reference sequence corresponding to SEQ ID NO: 1464.

60. The engineered adenosine kinase of claim 18, comprising an amino acid sequence having at least 70%, 75%, 80%, 81%, 82%, 83%, 84%, 85%, 86%, 87%, 88%, 89%, 90%, 91%, 92%, 93%, 94%, 95%, 96%, 97%, 98%, 99%, or more sequence identity to the reference sequence corresponding to residues 12-321 of SEQ ID NO: 1568, or to the reference sequence corresponding to SEQ ID NO: 1568, wherein the amino acid sequence comprises one or more substitutions relative to the reference sequence corresponding to residues 12-321 of SEQ ID NO: 1568, or relative to the reference sequence corresponding to SEQ ID NO: 1568.

61. The engineered adenosine kinase of claim 19, comprising an amino acid sequence having at least 70%, 75%, 80%, 81%, 82%, 83%, 84%, 85%, 86%, 87%, 88%, 89%, 90%, 91%, 92%, 93%, 94%, 95%, 96%, 97%, 98%, 99%, or more sequence identity to the reference sequence corresponding to residues 12-321 of an even-numbered SEQ ID NO. of SEQ ID NOs: 1580-1648, or to the reference sequence corresponding to an even-numbered SEQ ID NO. of SEQ ID NOs: 1580-1648, wherein the amino acid sequence comprises one or more substitutions relative to the reference sequence corresponding to residues 12-321 of SEQ ID NO: 1568, or relative to the reference sequence corresponding to SEQ ID NO: 1568.

62. The engineered adenosine kinase of claim 60 or 61, wherein the amino acid sequence of the engineered adenosine kinase comprises at least a substitution or substitution set at amino acid position(s) 246, 74, 185, 244, 164, 276, 43, 163, 217, 31, 43/276, 185/187/276, 43/187/222/276, 185/187/222/276, 187/276, 185/276, 164/222, 164/187/222/276, 43/222/276, 164/187/222, 222, 43/164/185/187/222, 222/276, 239, or 53, wherein the amino acid positions are relative to the reference sequence corresponding to residues 12-321 of SEQ ID NO: 1568, or relative to the reference sequence corresponding to SEQ ID NO: 1568.

63. The engineered adenosine kinase of any one of claims 60-62, wherein the amino acid sequence of the engineered adenosine kinase comprises at least a substitution or substitution set, or amino acid residue(s) 246V, 74R, 185T, 244R, 246R, 164S, 276G, 43E, 246S, 163G, 217A, 31H, 43E/276E, 185S/187S/276G, 43E/187S/222Q/276D, 185S/187S/222Q/276D, 187S/276E, 187S/276D, 185S/276E, 164S/222Q, 164S/187S/222Q/276G, 43E/222Q/276G, 164S/187S/222Q, 222Q, 43E/164S/185S/187S/222Q, 222Q/276G, 276E, 276D, 31L, 31Y, 164Q, 239M, 53L, 185S, or 164A, wherein the amino acid positions are relative to the reference sequence corresponding to residues 12-321 of SEQ ID NO: 1568, or relative to the reference sequence corresponding to SEQ ID NO: 1568.

64. The engineered adenosine kinase of claim 18, comprising an amino acid sequence having at least 70%, 75%, 80%, 81%, 82%, 83%, 84%, 85%, 86%, 87%, 88%, 89%, 90%, 91%, 92%, 93%, 94%, 95%, 96%, 97%, 98%, 99%, or more sequence identity to the reference sequence corresponding to residues 12-321 of SEQ ID NO: 1616, or to the reference sequence corresponding to SEQ ID NO: 1616, wherein the amino acid sequence comprises one or more substitutions relative to the reference sequence corresponding to residues 12-321 of SEQ ID NO: 1616, or relative to the reference sequence corresponding to SEQ ID NO: 1616.

65. The engineered adenosine kinase of claim 19, comprising an amino acid sequence having at least 70%, 75%, 80%, 81%, 82%, 83%, 84%, 85%, 86%, 87%, 88%, 89%, 90%, 91%, 92%, 93%, 94%, 95%, 96%, 97%, 98%, 99%, or more sequence identity to the reference sequence corresponding to residues 12-321 of an even-numbered SEQ ID NO. of SEQ ID NOs: 1650-1742, or to the reference sequence corresponding to an even-numbered SEQ ID NO. of SEQ ID NOs: 1650-1742, wherein the amino acid sequence comprises one or more substitutions relative to the reference sequence corresponding to residues 12-321 of SEQ ID NO: 1616, or relative to the reference sequence corresponding to SEQ ID NO: 1616.

66. The engineered adenosine kinase of claim 64 or 65, wherein the amino acid sequence of the engineered adenosine kinase comprises at least a substitution or substitution set at amino acid position(s) 74/239/244/246, 31/74/207/239/244/246, 31/246, 74/244, 31/74, 53/74/239/244/246, 31/74/207/244/246, 31/74/163/239/244, 31/74/239/244/246, 31/244/246, 31/53/164, 31/239/244, 239/246, 163/164/207/239/244/246, 31/74/163/246, 244, 31/239/244/246, 31/53/239/244/246, 31/207/244/246, 31, 31/53/74/239/246, 31/74/207, 31/163/207/244, 31/53/244, 31/163, 31/53/239/246, 74/207/239/244, 31/163/164/207/239/244/246, 74/207, 31/163/207/239/244, 31/74/163/164/207/246, 31/53/207/239, 207, 53/163/207/246, 31/53/74/163/207/246, 31/163/239/246/308, 31/74/207/239/308, or 163/207/246, wherein the amino acid positions are relative to the reference sequence corresponding to residues 12-321 of SEQ ID NO: 1616, or relative to the reference sequence corresponding to SEQ ID NO: 1616.

67. The engineered adenosine kinase of any one of claims 64-66, wherein the amino acid sequence of the engineered adenosine kinase comprises at least a substitution or substitution set, or amino acid residue(s) 74T/239M/244R/246V, 31Y/74R/207M/239M/244R/246V, 31Y/246S, 74R/244R, 31R/74R, 53L/74T/239M/244R/246S, 53L/74R/239M/244R/246V, 31R/74T/207M/244R/246S, 31Y/74R/163G/239M/244R, 31Y/74R/239M/244R/246V, 31L/244R/246S, 31Y/244R/246S, 31R/53L/164Q, 31R/239M/244R, 239M/246V, 163G/164Q/207M/239M/244R/246V, 31Y/74R/163G/246V, 244R, 31L/239M/244R/246S, 31Y/74T, 31L/53L/239M/244R/246V, 31Y/74R, 31Y/207M/244R/246V, 31Y/53L/239M/244R/246V, 31Y, 31L/53L/74T/239M/246S, 31Y/74R/207M, 31Y/163G/207M/244R, 31R/207M/244R/246V, 31Y/53L/244R, 31Y/163G, 31R, 31R/53L/239M/246S, 74T/207M/239M/244R, 31L/163G/164Q/207M/239M/244R/246V, 74T/207M, 31Y/163G/207M/239M/244R, 31L/74R/163G/164Q/207M/246V, 31Y/53L/207M/239M, 31Y/207M/244R/246S, 207M, 53L/163G/207M/246S, 31R/53L/74T/163G/207M/246S, 31Y/163G/239M/246V/308K, 31R/207M/244R/246S, 31Y/74R/207M/239M/308K, or 163G/207M/246V, wherein the amino acid positions are relative to the reference sequence corresponding to residues 12-321 of SEQ ID NO: 1616, or relative to the reference sequence corresponding to SEQ ID NO: 1616.

68. The engineered adenosine kinase of claim 18, comprising an amino acid sequence having at least 70%, 75%, 80%, 81%, 82%, 83%, 84%, 85%, 86%, 87%, 88%, 89%, 90%, 91%, 92%, 93%, 94%, 95%, 96%, 97%, 98%, 99%, or more sequence identity to the reference sequence corresponding to residues 12-321 of SEQ ID NO: 1668, or to the reference sequence corresponding to SEQ ID NO: 1668, wherein the amino acid sequence comprises one or more substitutions relative to the reference sequence corresponding to residues 12-321 of SEQ ID NO: 1668, or relative to the reference sequence corresponding to SEQ ID NO: 1668.

69. The engineered adenosine kinase of claim 19, comprising an amino acid sequence having at least 70%, 75%, 80%, 81%, 82%, 83%, 84%, 85%, 86%, 87%, 88%, 89%, 90%, 91%, 92%, 93%, 94%, 95%, 96%, 97%, 98%, 99%, or more sequence identity to the reference sequence corresponding to residues 12-321 of an even-numbered SEQ ID NO. of SEQ ID NOs: 1744-1808, or to the reference sequence corresponding to an even-numbered SEQ ID NO. of SEQ ID NOs: 1744-1808, wherein the amino acid sequence comprises one or more substitutions relative to the reference sequence corresponding to residues 12-321 of SEQ ID NO: 1668, or relative to the reference sequence corresponding to SEQ ID NO: 1668.

70. The engineered adenosine kinase of claim 68 or 69, wherein the amino acid sequence of the engineered adenosine kinase comprises at least a substitution or substitution set at amino acid position(s) 312, 305, 246, 89, 33, 218, 147, 27/218/305/312, 27/35/106/218/312, 27/218/312, 27/312, 27/305/312, 27/106/218/312, 27/218, 27/106/312, 35/305, 27/144/312, 27/218/305, 35/312, 27/106/218/305/312, 27/35/106/312, 106/218/305, 106/218/312, 27/106/305, 27/35/94/106/305/312, 35/218/312, 218/312, 27/106/218, 35/106/312, or 27/106, wherein the amino acid positions are relative to the reference sequence corresponding to residues 12-321 of SEQ ID NO: 1668, or relative to the reference sequence corresponding to SEQ ID NO: 1668.

71. The engineered adenosine kinase of any one of claims 68-70, wherein the amino acid sequence of the engineered adenosine kinase comprises at least a substitution or substitution set, or amino acid residue(s) 312R, 305T, 246D, 89K, 33A, 218D, 147N, 27W/218D/305T/312R, 27K/35Y/106P/218D/312R, 27W/218D/312R, 27W/312R, 27W/305T/312R, 27W/106P/218D/312R, 27W/218D, 27W/106P/312R, 35Y/305T, 27W/144S/312R, 27W/218D/305S, 35Y/312R, 27W/106P/218D/305S/312R, 27W/35Y/106P/312R, 106P/218D/305T, 27W/106P/218D/305T/312R, 106P/218D/312R, 27W/106P/305T, 27W/35Y/94N/106P/305S/312R, 35Y/218D/312R, 218D/312R, 27W/106P/218D, 35Y/106P/312R, 27W/106P, or 27W/106P/305S, wherein the amino acid positions are relative to the reference sequence corresponding to residues 12-321 of SEQ ID NO: 1668, or relative to the reference sequence corresponding to SEQ ID NO: 1668.

72. The engineered adenosine kinase of claim 18, comprising an amino acid sequence having at least 70%, 75%, 80%, 81%, 82%, 83%, 84%, 85%, 86%, 87%, 88%, 89%, 90%, 91%, 92%, 93%, 94%, 95%, 96%, 97%, 98%, 99%, or more sequence identity to the reference sequence corresponding to residues 12-321 of SEQ ID NO: 1766, or to the reference sequence corresponding to SEQ ID NO: 1766, wherein the amino acid sequence comprises one or more substitutions relative to the reference sequence corresponding to residues 12-321 of SEQ ID NO: 1766, or relative to the reference sequence corresponding to SEQ ID NO: 1766.

73. The engineered adenosine kinase of claim 19, comprising an amino acid sequence having at least 70%, 75%, 80%, 81%, 82%, 83%, 84%, 85%, 86%, 87%, 88%, 89%, 90%, 91%, 92%, 93%, 94%, 95%, 96%, 97%, 98%, 99%, or more sequence identity to the reference sequence corresponding to residues 12-321 of an even-numbered SEQ ID NO. of SEQ ID NOs: 1818-1870, or to the reference sequence corresponding to an even-numbered SEQ ID NO. of SEQ ID NOs: 1818-1870, wherein the amino acid sequence comprises one or more substitutions relative to the reference sequence corresponding to residues 12-321 of SEQ ID NO: 1766, or relative to the reference sequence corresponding to SEQ ID NO: 1766.

74. The engineered adenosine kinase of claim 72 or 73, wherein the amino acid sequence of the engineered adenosine kinase comprises at least a substitution at amino acid position 34, 112, 126, 128, 155, 179, 183, 229, 236, 248, 253, 254, 292, 293, or 299, or combinations thereof, wherein the amino acid positions are relative to the reference sequence corresponding to amino acid residues 12-321 of SEQ ID NO: 1766, or relative to the reference sequence corresponding to SEQ ID NO: 1766.

75. The engineered adenosine kinase of any one of claims 72-74, wherein the amino acid sequence of the engineered adenosine kinase comprises at least a substitution, or amino acid residue 34C, 112I, 126L, 128V, 155T, 179N, 183S, 183V, 229C, 229V, 236C, 248E, 253D, 253E, 253G, 253H, 253K, 253L, 253S, 253T, 253V, 254M, 254T, 292I, 292V, 293M, or 299G, or combinations thereof, wherein the amino acid positions are relative to the reference sequence corresponding to residues 12-321 of SEQ ID NO: 1766, or relative to the reference sequence corresponding to SEQ ID NO: 1766.

76. The engineered adenosine kinase of claim 18, comprising an amino acid sequence having at least 70%, 75%, 80%, 81%, 82%, 83%, 84%, 85%, 86%, 87%, 88%, 89%, 90%, 91%, 92%, 93%, 94%, 95%, 96%, 97%, 98%, 99%, or more sequence identity to the reference sequence corresponding to residues 12-321 of SEQ ID NO: 1826, or to the reference sequence corresponding to SEQ ID NO: 1826, wherein the amino acid sequence comprises one or more substitutions relative to the reference sequence corresponding to residues 12-321 of SEQ ID NO: 1826, or relative to the reference sequence corresponding to SEQ ID NO: 1826.

77. The engineered adenosine kinase of claim 19, comprising an amino acid sequence having at least 70%, 75%, 80%, 81%, 82%, 83%, 84%, 85%, 86%, 87%, 88%, 89%, 90%, 91%, 92%, 93%, 94%, 95%, 96%, 97%, 98%, 99%, or more sequence identity to the reference sequence corresponding to residues 12-321 of an even-numbered SEQ ID NO. of SEQ ID NOs: 1872-1936, or to the reference sequence corresponding to an even-numbered SEQ ID NO. of SEQ ID NOs: 1872-1936, wherein the amino acid sequence comprises one or more substitutions relative to the reference sequence corresponding to residues 12-321 of SEQ ID NO: 1826, or relative to the reference sequence corresponding to SEQ ID NO: 1826.

78. The engineered adenosine kinase of claim 76 or 77, wherein the amino acid sequence of the engineered adenosine kinase comprises at least a substitution at amino acid position 14, 38, 46, 108, 146, 211, 243, 275, 303, 311, or 320, or combinations thereof, wherein the amino acid positions are relative to the reference sequence corresponding to amino acid residues 12-321 of SEQ ID NO: 1826, or relative to the reference sequence corresponding to SEQ ID NO: 1826.

79. The engineered adenosine kinase of any one of claims 76-78, wherein the amino acid sequence of the engineered adenosine kinase comprises at least a substitution, or amino acid residue 14S, 14T, 38R, 46I, 108A, 146C, 211R, 243F, 275S, 303D, 303S, 311E, 320G, or 320R, or combinations thereof, wherein the amino acid positions are relative to the reference sequence corresponding to residues 12-321 of SEQ ID NO: 1826, or relative to the reference sequence corresponding to SEQ ID NO: 1826.

80. The engineered adenosine kinase of claim 76 or 77, wherein the amino acid sequence of the engineered adenosine kinase comprises at least a substitution at amino acid position 94, 106, 108, 194, 274, 303, 307, or 315, or combinations thereof, wherein the amino acid positions are relative to the reference sequence corresponding to amino acid residues 12-321 of SEQ ID NO: 1826, or relative to the reference sequence corresponding to SEQ ID NO: 1826.

81. The engineered adenosine kinase of any one of claims 76, 77, and 80, wherein the amino acid sequence of the engineered adenosine kinase comprises at least a substitution, or amino acid residue 94M, 106L, 108E, 194R, 274R, 303V, 307G, or 315S, or combinations thereof, wherein the amino acid positions are relative to the reference sequence corresponding to residues 12-321 of SEQ ID NO: 1826, or relative to the reference sequence corresponding to SEQ ID NO: 1826.

82. The engineered adenosine kinase of claim 76 or 77, wherein the amino acid sequence of the engineered adenosine kinase comprises at least a substitution or substitution set at amino acid position(s) 112/183/292/299, 112/292, 126/299, 155, 155/183/299, 155/299, 183/255/299, 183/299, 229/299, 255/299, or 292, wherein the amino acid positions are relative to the reference sequence corresponding to amino acid residues 12-321 of SEQ ID NO: 1826, or relative to the reference sequence corresponding to SEQ ID NO: 1826.

83. The engineered adenosine kinase of any one of claims 76, 77, and 82 wherein the amino acid sequence of the engineered adenosine kinase comprises at least a substitution set, or amino acid residue(s) 112I/183V/292I/299G, 112I/292I, 126L/299G, 155T, 155T/183V/299G, 155T/299G, 183V/255I/299G, 183V/299G, 229H/299G, 255I/299G, and 292I, wherein the amino acid positions are relative to the reference sequence corresponding to residues 12-321 of SEQ ID NO: 1826, or relative to the reference sequence corresponding to SEQ ID NO: 1826.

84. The engineered adenosine kinase of claim 18, comprising an amino acid sequence having at least 70%, 75%, 80%, 81%, 82%, 83%, 84%, 85%, 86%, 87%, 88%, 89%, 90%, 91%, 92%, 93%, 94%, 95%, 96%, 97%, 98%, 99%, or more sequence identity to the reference sequence corresponding to residues 12-321 of SEQ ID NO: 1918, or to the reference sequence corresponding to SEQ ID NO: 1918, wherein the amino acid sequence comprises one or more substitutions relative to the reference sequence corresponding to residues 12-321 of SEQ ID NO: 1918, or relative to the reference sequence corresponding to SEQ ID NO: 1918.

85. The engineered adenosine kinase of claim 19, comprising an amino acid sequence having at least 70%, 75%, 80%, 81%, 82%, 83%, 84%, 85%, 86%, 87%, 88%, 89%, 90%, 91%, 92%, 93%, 94%, 95%, 96%, 97%, 98%, 99%, or more sequence identity to the reference sequence corresponding to residues 12-321 of an even-numbered SEQ ID NO. of SEQ ID NOs: 1938-2010, or to the reference sequence corresponding to an even-numbered SEQ ID NO. of SEQ ID NOs: 1938-2010, wherein the amino acid sequence comprises one or more substitutions relative to the reference sequence corresponding to residues 12-321 of SEQ ID NO: 1918, or relative to the reference sequence corresponding to SEQ ID NO: 1918.

86. The engineered adenosine kinase of claim 84 or 85, wherein the amino acid sequence of the engineered adenosine kinase comprises at least a substitution at amino acid position 26, 27, 28, 29, 31, 33, 35, 42, 136, 212, 218, 237, 239, 245, 246, 252, 276, or 316, or combinations thereof, wherein the amino acid positions are relative to the reference sequence corresponding to amino acid residues 12-321 of SEQ ID NO: 1918, or relative to the reference sequence corresponding to SEQ ID NO: 1918.

87. The engineered adenosine kinase of any one of claims 84-86, wherein the amino acid sequence of the engineered adenosine kinase comprises at least a substitution, or amino acid residue 26F, 27C, 27G, 27R, 27S, 28L, 28M, 29G, 31H, 33A, 33P, 35D, 35E, 42G, 42N, 42Q, 136F, 212A, 218R, 237K, 237L, 237Q, 239A, 239G, 239H, 239I, 239T, 239W, 245F, 245Q, 246A, 246T, 252A, 252G, 276G, 316A, or 316I, or combinations thereof, wherein the amino acid positions are relative to the reference sequence corresponding to residues 12-321 of SEQ ID NO: 1918, or relative to the reference sequence corresponding to SEQ ID NO: 1918.

88. The engineered adenosine kinase of claim 18, comprising an amino acid sequence having at least 70%, 75%, 80%, 81%, 82%, 83%, 84%, 85%, 86%, 87%, 88%, 89%, 90%, 91%, 92%, 93%, 94%, 95%, 96%, 97%, 98%, 99%, or more sequence identity to the reference sequence corresponding to residues 12-321 of SEQ ID NO: 1942, or to the reference sequence corresponding to SEQ ID NO: 1942, wherein the amino acid sequence comprises one or more substitutions relative to the reference sequence corresponding to residues 12-321 of SEQ ID NO: 1942, or relative to the reference sequence corresponding to SEQ ID NO: 1942.

89. The engineered adenosine kinase of claim 19, comprising an amino acid sequence having at least 70%, 75%, 80%, 81%, 82%, 83%, 84%, 85%, 86%, 87%, 88%, 89%, 90%, 91%, 92%, 93%, 94%, 95%, 96%, 97%, 98%, 99%, or more sequence identity to the reference sequence corresponding to residues 12-321 of an even-numbered SEQ ID NO. of SEQ ID NOs: 2012-2124, or to the reference sequence corresponding to an even-numbered SEQ ID NO. of SEQ ID NOs: 2012-2124, wherein the amino acid sequence comprises one or more substitutions relative to the reference sequence corresponding to residues 12-321 of SEQ ID NO: 1942, or relative to the reference sequence corresponding to SEQ ID NO: 1942.

90. The engineered adenosine kinase of claim 88 or 89, wherein the amino acid sequence of the engineered adenosine kinase comprises at least a substitution or substitution set at amino acid position(s) 26/27, 26/27/28, 26/27/28/31, 26/27/28/245, 26/28/31, 27, 27/28, 27/28/29/126, 27/29, 27/29/126, 27/29/237, 27/29/245, 27/31/126/245, 27/31/155, 27/126, 27/126/155, 27/126/237, 27/126/237/245, 27/237, 27/245, 28, 28/31, 28/31/239, 28/42/126/245, 28/42/245, 28/239, 29/31, 29/31/126/239, 30/31/33/35/126/218, 30/31/33/126/276/316, 30/33/35, 31/33/218/276, 31/126, 31/126/155, 33, 33/126/239, 42, 126, 126/155, 126/155/237, 126/155/239/276, 126/155/239/316, 126/239, 126/239/316, 126/245, 126/316, 155/276/316, 155/316, 218, 218/239/316, 239, 245, 252/276, or 316, wherein the amino acid positions are relative to the reference sequence corresponding to amino acid residues 12-321 of SEQ ID NO: 1942, or relative to the reference sequence corresponding to SEQ ID NO: 1942.

91. The engineered adenosine kinase of any one of claims 88-90, wherein the amino acid sequence of the engineered adenosine kinase comprises at least a substitution set or amino acid residues 26F/27G/28M, 26F/27R, 26F/27R/28L/31H, 26F/27R/28M/245F, 26F/28M/31H, 27G, 27G/28M, 27G/29G, 27G/29G/237K, 27G/29G/237Q, 27G/29G/245F, 27G/31H/126A/245F, 27G/31H/155T, 27G/126A, 27G/126A/155T, 27G/126A/237K, 27G/126A/237Q/245F, 27G/237K, 27G/245F, 27R, 27R/28M/29G/126A, 27R/29G/126A, 27R/245F, 28L/31H/239T, 28L/239T, 28M, 28M/31H, 28M/42N/126A/245F, 28M/42N/245F, 29G/31H, 29G/31H/126A/239T, 30G/31H/33A/35D/126A/218N, 30G/31H/33A/126A/276G/316I, 30G/33A/35D, 31H/33A/218N/276G, 31H/126A, 31H/126A/155T, 33A, 33A/126A/239H, 42N, 126A, 126A/155T, 126A/155T/237K, 126A/155T/239H/316I, 126A/155T/239T/276G, 126A/239H, 126A/239H/316I, 126A/245F, 126A/316I, 155T/276G/316I, 155T/316I, 218N, 218N/239H/316I, 239H, 245F, 252T/276G, or 316I, wherein the amino acid positions are relative to the reference sequence corresponding to residues 12-321 of SEQ ID NO: 1942, or relative to the reference sequence corresponding to SEQ ID NO: 1942.

92. The engineered adenosine kinase of any one of claims 1-5, wherein the amino acid sequence of the engineered adenosine kinase comprises at least one substitution set forth in Tables 7.1, 7.2, 8.1, 9.1, 10.2, 11.2, 12.2, 13.2, 14.2, 15.2, 16.2, 17.2, 18.2, 20.2, 21.2, 22.2, 23.2, 24.2, 25.2, 26.2, 27.2, 28.2, 29.2, 30.2, 31.2, 32.2, 33.2, 34.2, 35.2, 36.2, 37.2, 38.2, 39.2, 40.2, 41.2, 42.2, 43.2, 45.2, 46.2, 47.2, 48.2, 49.2 and 50.2, wherein the amino acid positions are relative to the reference sequence corresponding to amino acid residues 12-321 of SEQ ID NO: 2, 90, 254, 370, 734, 896, 1196, 1366, 1382, 1464, 1568, 1616, 1668, 1766, 1826, 1918, or 1942, or relative to the reference sequence corresponding to SEQ ID NO: 2, 90, 254, 370, 734, 896, 1196, 1366, 1382, 1464, 1568, 1616, 1668, 1766, 1826, 1918, or 1942.

93. The engineered adenosine kinase of any one of claims 1-5, wherein the amino acid sequence of the engineered adenosine kinase comprises at least a substitution or substitution set of an engineered adenosine kinase variant set forth in Tables 7.1, 7.2, 8.1, 9.1, 10.2, 11.2, 12.2, 13.2, 14.2, 15.2, 16.2, 17.2, 18.2, 20.2, 21.2, 22.2, 23.2, 24.2, 25.2, 26.2, 27.2, 28.2, 29.2, 30.2, 31.2, 32.2, 33.2, 34.2, 35.2, 36.2, 37.2, 38.2, 39.2, 40.2, 41.2, 42.2, 43.2, 45.2, 46.2, 47.2, 48.2, 49.2 and 50.2, wherein the amino acid positions are relative to the reference sequence corresponding to amino acid residues 12-321 of SEQ ID NO: 2, 90, 254, 370, 734, 896, 1196, 1366, 1382, 1464, 1568, 1616, 1668, 1766, 1826, 1918, or 1942, or relative to the reference sequence corresponding to SEQ ID NO: 2, 90, 254, 370, 734, 896, 1196, 1366, 1382, 1464, 1568, 1616, 1668, 1766, 1826, 1918, or 1942.

94. The engineered adenosine kinase of any one of claims 1-5, wherein the adenosine kinase comprises an amino acid sequence having at least 70%, 75%, 80%, 81%, 82%, 83%, 84%, 85%, 86%, 87%, 88%, 89%, 90%, 91%, 92%, 93%, 94%, 95%, 96%, 97%, 98%, 99% or more sequence identity to a reference amino acid sequence comprising a substitution or substitution set of an engineered adenosine kinase variant set forth in Tables 7.1, 7.2, 8.1, 9.1, 10.2, 11.2, 12.2, 13.2, 14.2, 15.2, 16.2, 17.2, 18.2, 20.2, 21.2, 22.2, 23.2, 24.2, 25.2, 26.2, 27.2, 28.2, 29.2, 30.2, 31.2, 32.2, 33.2, 34.2, 35.2, 36.2, 37.2, 38.2, 39.2, 40.2, 41.2, 42.2, 43.2, 45.2, 46.2, 47.2, 48.2, 49.2 and 50.2, wherein the amino acid positions are relative to the reference sequence corresponding to amino acid residues 12-321 of SEQ ID NO: 2, 90, 254, 370, 734, 896, 1196, 1366, 1382, 1464, 1568, 1616, 1668, 1766, 1826, 1918, or 1942, or relative to the reference sequence corresponding to SEQ ID NO: 2, 90, 254, 370, 734, 896, 1196, 1366, 1382, 1464, 1568, 1616, 1668, 1766, 1826, 1918, or 1942.

95. The engineered adenosine kinase of claim 1, wherein the amino acid sequence of the engineered adenosine kinase comprises residues 12-321 of an even-numbered SEQ ID NO. of SEQ ID NOs: 4-1142, 1194-1808 and 1818-2124, or comprises an even-numbered SEQ ID NO. of SEQ ID NOs: 4-1142, 1194-1808 and 1818-2124, optionally wherein the engineered adenosine kinase has 1, 2, 3, 4, 5, 6, 7, 8, 9, or up to 10 substitutions in the amino acid sequence.

96. The engineered adenosine kinase of claim 1, wherein the amino acid sequence of the engineered adenosine kinase comprises residues 12-321 of SEQ ID NO: 90, 254, 370, 734, 896, 1196, 1366, 1382, 1464, 1568, 1616, 1668, 1766, 1826, 1918, or 1942, or wherein the amino acid sequence comprises SEQ ID NO: 90, 254, 370, 734, 896, 1196, 1366, 1382, 1464, 1568, 1616, 1668, 1766, 1826, 1918, or 1942, optionally wherein the engineered adenosine kinase has 1, 2, 3, 4, 5, 6, 7, 8, 9, or up to 10 substitutions in the amino acid sequence.

97. The engineered adenosine kinase of any one of claims 1-96, having adenosine kinase activity and at least one improved property as compared to a reference adenosine kinase.

98. The engineered adenosine kinase of claim 97, wherein the improved property is selected from i) increased activity on unmodified nucleoside, ii) increased thermostability, iii) increased activity on cytidine, iv) increased activity on 2-fluoro modified nucleosides, and v) increased activity on 2-O-methyl modified nucleosides, or any combinations of i), ii), iii), iv), and v), compared to the reference adenosine kinase.

99. The engineered adenosine kinase of claims 97 or 98, wherein the reference adenosine kinase has an amino acid sequence corresponding to residues 12-321 of SEQ ID NO: 2, 90, 254, 370, 734, 896, 1196, 1366, 1382, 1464, 1568, 1616, 1668, 1766, 1826, 1918, or 1942, or an amino acid sequence corresponding to SEQ ID NO: 2, 90, 254, 370, 734, 896, 1196, 1366, 1382, 1464, 1568, 1616, 1668, 1766, 1826, 1918, or 1942.

100. The engineered adenosine kinase of any one of claims 1-99, comprising a fusion polypeptide.

101. The engineered adenosine kinase of any one of claims 1-100, wherein the engineered adenosine kinase is purified.

102. The engineered adenosine kinase of any one of claims 1-101, wherein the engineered adenosine kinase is immobilized on a substrate or support medium.

103. A recombinant polynucleotide comprising a polynucleotide sequence encoding an engineered adenosine kinase of any one of claims 1-99.

104. The recombinant polynucleotide of claim 103, comprising a polynucleotide sequence having at least 70%, 75%, 80%, 81%, 82%, 83%, 84%, 85%, 86%, 87%, 88%, 89%, 90%, 91%, 92%, 93%, 94%, 95%, 96%, 97%, 98%, 99%, or more sequence identity to a reference polynucleotide sequence corresponding to nucleotide residues 34-963 of SEQ ID NO: 1, 89, 253, 369, 733, 895, 1195, 1365, 1381, 1463, 1567, 1615, 1667, 1765, 1825, 1917, or 1941, or to a reference polynucleotide sequence corresponding to SEQ ID NO: 1, 89, 253, 369, 733, 895, 1195, 1365, 1381, 1463, 1567, 1615, 1667, 1765, 1825, 1917, or 1941, wherein the recombinant polynucleotide encodes an adenosine kinase.

105. The recombinant polynucleotide of claim 103, comprising a polynucleotide sequence having at least 70%, 75%, 80%, 81%, 82%, 83%, 84%, 85%, 86%, 87%, 88%, 89%, 90%, 91%, 92%, 93%, 94%, 95%, 96%, 97%, 98%, 99%, or more sequence identity to a reference polynucleotide sequence corresponding to nucleotide residues 34-963 of an odd-numbered SEQ ID NO. of SEQ ID NOs: 3-1141, 1193-1807, and 1817-2123 or to a reference polynucleotide sequence corresponding to an odd-numbered SEQ ID NO. of SEQ ID NOs: 3-1141, 1193-1807, and 1817-2123 wherein the recombinant polynucleotide encodes an engineered adenosine kinase.

106. The recombinant polynucleotide of any one of claims 103-105, wherein the polynucleotide sequence has preferred codons or is codon optimized.

107. The recombinant polynucleotide of claim 103, wherein the polynucleotide sequence comprises nucleotide residues 34-963 of SEQ ID NO: 1, 89, 253, 369, 733, 895, 1195, 1365, 1381, 1463, 1567, 1615, 1667, 1765, 1825, 1917, or 1941, or comprises SEQ ID NO: 1, 89, 253, 369, 733, 895, 1195, 1365, 1381, 1463, 1567, 1615, 1667, 1765, 1825, 1917, or 1941.

108. The recombinant polynucleotide of claim 103, wherein the polynucleotide sequence comprises nucleotide residues 34-963 of an odd-numbered SEQ ID NO. of SEQ ID NOs: 3-1141, 1193-1807, and 1817-2123, or comprises an odd-numbered SEQ ID NO. of SEQ ID NOs: 3-1141, 1193-1807, and 1817-2123.

109. An expression vector comprising a recombinant polynucleotide of any one of claims 103-108.

110. The expression vector of claim 109, wherein the recombinant polynucleotide is operably linked to a control sequence.

111. The expression vector of claim 110, wherein the control sequence comprises at least a promoter.

112. A host cell comprising an expression vector of any one of claims 109-111.

113. The host cell of claim 112 comprising a bacterial cell, fungal cell, insect cell, or mammalian cell.

114. A method of producing an engineered adenosine kinase polypeptide, comprising culturing a host cell of claim 112 or 119 under suitable culture conditions such that the engineered adenosine kinase polypeptide is produced.

115. The method of claim 114, further comprising recovering the engineered adenosine kinase polypeptide from the culture and/or host cells.

116. The method of claim 114 or 115, further comprising purifying the engineered adenosine kinase polypeptide.

117. A composition comprising an engineered adenosine kinase of any one of claims 1-102.

118. The composition of claim 117, further comprising a nucleoside substrate.

119. The composition of claim 118, wherein the nucleoside is a modified nucleoside substrate.

120. A method of converting a nucleoside or a modified nucleoside to corresponding nucleoside monophosphate (NMP), comprising contacting a nucleoside with an engineered adenosine kinase of any one of claims 1-102 in the presence of phosphate donor NTP under suitable reaction conditions to convert the nucleoside to the corresponding nucleoside monophosphate (NMP).

121. The method of claim 120, wherein the nucleoside is an unmodified nucleoside.

122. The method of claim 121, wherein the nucleoside is adenosine, guanosine, uridine, cytidine, or thymidine.

123. The method of any one of claims 120-122, wherein the nucleoside has at the 2′-position of the sugar moiety a H or OH.

124. The method of claim 123, wherein the nucleoside is adenosine, guanosine, uridine, cytidine, or thymidine, and wherein the nucleoside has at the 2′-position of the sugar moiety an OH, thereby by resulting in corresponding product rAMP, rGMP, rUMP, rCMP, or rTMP, respectively.

125. The method of claim 123, wherein the nucleoside is adenosine, guanosine, uridine, cytidine, or thymidine, and wherein the nucleoside has at the 2′-position of the sugar moiety an H, thereby by resulting in corresponding product dAMP, dGMP, dUMP, dCMP, or dTMP, respectively.

126. The method of claim 120, wherein the nucleoside is a modified nucleoside, wherein the nucleoside has a modified sugar moiety or modified nucleobase, or a combination thereof.

127. The method of claim 126, wherein the modified nucleoside comprises a modified sugar moiety, wherein the sugar moiety has a modified 2′-position or 3′-position.

128. The method of claim 127, wherein the modified sugar moiety has a modified 2′-position of the sugar moiety.

129. The method of claim 128, wherein the 2′-position is a 2′-O-alkyl or 2-halo.

130. The method of claim 129, wherein the 2′-position is a 2′-O-alkyl, and wherein the 2′-O-alkyl is 2′-O—CH₃ or 2′-O—CH₂CH₃.

131. The method of claim 129, wherein the 2′-position is 2-halo.

132. The method of claim 131, wherein the 2′-position is 2′-F or 2′-Br.

133. The method of any one of claims 127-132, wherein the modified sugar moiety is modified at the 3′-position.

134. The method of claim 133, wherein the 3′-position is modified with a blocking group, wherein the blocking group is formate, benzoylformate, acetate, propionate, isobutyrate, aminoxy (—ONH₂), O-methyl, O-methoxymethyl, O-methylthiomethyl, O-benzyloxymethyl, O-allyl, O-(2-nitrobenzyl), O-azidomethyl (O—CH₂N₃), O-tert-butyldithiomethyl, phosphate, or triphosphate.

135. The method of any one of claims 126-134, wherein the modified nucleoside comprises a modified nucleobase, wherein the modified nucleobase is 5-bromo-uracil, 5-iodo-uracil, 6-mCEPh-purine, 6-phenylpyrrolocytidine, N2-alkyl 8-oxoguanosine, difluorotoluene, difluorobenzene, dichlorobenzene, imidazole, or benzimidazole.

136. The method of any one of claims 120-135, wherein the phosphate donor NTP is rATP or dATP.

137. The method of any one of claims 120-135, wherein the phosphate donor NTP is nucleoside-5′-gamma-thiotriphosphate (NTPγS), thereby resulting in product nucleoside 5′-thiophosphate (NMP-S).

138. The method of any one of claims 120-135, wherein the phosphate donor NTP has the same nucleoside structure of the nucleoside substrate.

139. The method of any one of claims 120-138, further comprising regenerating the NTP using a NTP regeneration system.

140. The method of claim 139, wherein the NTP regenerating system comprises creatine kinase, pyruvate kinase, polyphosphate kinase, and/or acetate-kinase.

141. The method of claim 140, wherein the NTP regenerating system is pyruvate kinase and substrate phosphoenolpyruvate.

142. The method of claim 140, wherein the NTP regenerating system is creatine kinase and substrate creatine phosphate.

143. The method of claim 140, wherein the NTP regenerating system is polyphosphate kinase and substrate polyphosphate.

144. The method of claim 140, wherein the NTP regenerating system is acetate kinase and substrate acetyl phosphate.

145. The method of claim 144, further comprising pyruvate oxidase and substrate pyruvate and inorganic phosphate.

146. The method of claim 145, further comprising including a catalase.

The application's sequence listing, which the Patent Office published only in electronic form, follows.

SEQUENCE LISTING (2138 sequences)

SEQ ID NO: 1 - DNA, 963 bp, synthetic construct
  misc_feature 1..963: note = Variant of adenosine kinase
  source 1..963: mol_type = other DNA
atgcaccatcatcaccatcacgggggctccggcatgagtgcactgatttgcggttctttagcgtatgataccatcatggtgtttccggaccagttcaagaaccatattctgcccgataaagttcacatcctcaatgtcagctttcttgtaccacgcatgcgtcgtgaatttggaggctgtgccggcaacattgcgtacaatctgcatctgttgggtggtgctccgatccctatgggaacggtgggccaagatttcggtccgtatcgcgagcacttcgaaactctgggcattgacttatcccgcgtcaagatcatcgatgatctgtttacaccgcaggccttcattaccaccgaccatgataacaaccagattacggcgtttcatccaggcgcaatgatgcgttcgtacgaaaatcacgttcgtgatgtgccgggtgttaccttgggcctcgtaggtcctgatggacgcgagggcatgatccaaaatgccgaagaatttgctgctggtggcattccgttcatttttgacccaggtcaggcaatgccgctgttcaacggccccgaactgcgcgagtttatcgaacaggcggactatgtggtggtcaacgattacgaaagcaatcttcttcaagaacgtactggctggaacgagcaggacattgtttcacgcgtgcaggcgtatatcaccacgcaaggtcctaaaggagccctggtacatacaccggagaagacctacgatattccgccggcacacgaacgtcgtgtcgttgatccaactggttgcggcgacgcgtttcgcgccggcctgatctatggtattcagcataattatgattggttgaccattggccgcatgggaaacttaatgggtgcgctgaaagtggaacaccctggcacgcaaaatcagcgtttcgattttgccgaattcaacgaccagttcaaacaacagtttggctacgcgctc

SEQ ID NO: 2 - protein, 321 aa, synthetic construct
  REGION 1..321: note = Variant of adenosine kinase
MHHHHHHGGSGMSALICGSLAYDTIMVFPDQFKNHILPDKVHILNVSFLVPRMRREFGGCAGNIAYNLHLLGGAPIPMGTVGQDFGPYREHFETLGIDLSRVKIIDDLFTPQAFITTDHDNNQITAFHPGAMMRSYENHVRDVPGVTLGLVGPDGREGMIQNAEEFAAGGIPFIFDPGQAMPLFNGPELREFIEQADYVVVNDYESNLLQERTGWNEQDIVSRVQAYITTQGPKGALVHTPEKTYDIPPAHERRVVDPTGCGDAFRAGLIYGIQHNYDWLTIGRMGNLMGALKVEHPGTQNQRFDFAEFNDQFKQQFGYAL

SEQ ID NO: 3 - DNA, 963 bp, synthetic construct
  misc_feature 1..963: note = Variant of adenosine kinase
  source 1..963: mol_type = other DNA
atgcaccatcatcaccatcacgggggctccggcatgagtgcactgatttgcggttctttagcgtatgataccatcatggtgtttccggaccagttcaagaaccatattctgcccgataaagttcacatcctcaatgtcagctttcttgtaccacgcatgcgtcgtgaatttggaggctgtgccggcaacattgcgtacaatctgcatctgttgggtggtgctccgatccctatgggaacggtgggccaagatttcggtccgtatcgcgagcacttcgaaactctgggcattgacttatcccgcgtcaagatcatcgatgatctgaggacagctcaggccttcattaccaccgaccatgataacaaccagattacggcgtttcatccaggcgcaatgatgcgttcgtacgaaaatcacgttcgtgatgtgccgggtgttaccttgggcctcgtaggtcctgatggacgcgagggcatgatccaaaatgccgaagaatttgctgctggtggcattccgttcatttttgacccaggtcaggcaatgccgctgttcaacggccccgaactgcgcgagtttatcgaacaggcggactatgtggtggtcaacgattacgaaagcaatcttcttcaagaacgtactggctggaacgagcaggacattgtttcacgcgtgcaggcgtatatcaccacgcaaggtcctaaaggagccctggtacatacaccggagaagacctacgatattccgccggcacacgaacgtcgtgtcgttgatccaactggttgcggcgacgcgtttcgcgccggcctgatctatggtattcagcataattatgattggttgaccattggccgcatgggaaacttaatgggtgcgctgaaagtggaacaccctggcacgcaaaatcagcgtttcgattttgccgaattcaacgaccagttcaaacaacagtttggctacgcgctc

SEQ ID NO: 4 - protein, 321 aa, synthetic construct
  REGION 1..321: note = Variant of adenosine kinase
MHHHHHHGGSGMSALICGSLAYDTIMVFPDQFKNHILPDKVHILNVSFLVPRMRREFGGCAGNIAYNLHLLGGAPIPMGTVGQDFGPYREHFETLGIDLSRVKIIDDLRTAQAFITTDHDNNQITAFHPGAMMRSYENHVRDVPGVTLGLVGPDGREGMIQNAEEFAAGGIPFIFDPGQAMPLFNGPELREFIEQADYVVVNDYESNLLQERTGWNEQDIVSRVQAYITTQGPKGALVHTPEKTYDIPPAHERRVVDPTGCGDAFRAGLIYGIQHNYDWLTIGRMGNLMGALKVEHPGTQNQRFDFAEFNDQFKQQFGYAL

SEQ ID NO: 5 - DNA, 963 bp, synthetic construct
  misc_feature 1..963: note = Variant of adenosine kinase
  source 1..963: mol_type = other DNA
atgcaccatcatcaccatcacgggggctccggcatgagtgcactgatttgcggttctttagcgtatgataccatcatggtgtttccggaccagttcaagaaccatattctgcccgataaagttcacatcctcaatgtcagctttcttgtaccacgcatgcgtcgtgaatttggaggctgtgccggcaacattgcgtacaatctgcatctgttgggtggtgctccgatccctatgggaacggtgggccaagatttcggtccgtatcgcgagcacttcgaaactctgggcattgacttatcccgcgtcaagggtatcgatgatctgtttacagctcaggccttcattaccaccgaccatgataacaaccagattacggcgtttcatccaggcgcaatgatgcgttcgtacgaaaatcacgttcgtgatgtgccgggtgttaccttgggcctcgtaggtcctgatggacgcgagggcatgatccaaaatgccgaagaatttgctgctggtggcattccgttcatttttgacccaggtcaggcaatgccgctgttcaacggccccgaactgcgcgagtttatcgaacaggcggactatgtggtggtcaacgattacgaaagcaatcttcttcaagaacgtactggctggaacgagcaggacattgtttcacgcgtgcaggcgtatatcaccacgcaaggtcctaaaggagccctggtacatacaccggagaagacctacgatattccgccggcacacgaacgtcgtgtcgttgatccaactggttgcggcgacgcgtttcgcgccggcctgatctatggtattcagcataattatgattggttgaccattggccgcatgggaaacttaatgggtgcgctgaaagtggaacaccctggcacgcaaaatcagcgtttcgattttgccgaattcaacgaccagttcaaacaacagtttggctacgcgctc

SEQ ID NO: 6 - protein, 321 aa, synthetic construct
  REGION 1..321: note = Variant of adenosine kinase
MHHHHHHGGSGMSALICGSLAYDTIMVFPDQFKNHILPDKVHILNVSFLVPRMRREFGGCAGNIAYNLHLLGGAPIPMGTVGQDFGPYREHFETLGIDLSRVKGIDDLFTAQAFITTDHDNNQITAFHPGAMMRSYENHVRDVPGVTLGLVGPDGREGMIQNAEEFAAGGIPFIFDPGQAMPLFNGPELREFIEQADYVVVNDYESNLLQERTGWNEQDIVSRVQAYITTQGPKGALVHTPEKTYDIPPAHERRVVDPTGCGDAFRAGLIYGIQHNYDWLTIGRMGNLMGALKVEHPGTQNQRFDFAEFNDQFKQQFGYAL

SEQ ID NO: 7 - DNA, 963 bp, synthetic construct
  misc_feature 1..963: note = Variant of adenosine kinase
  source 1..963: mol_type = other DNA
atgcaccatcatcaccatcacgggggctccggcatgagtgcactgatttgcggttctttagcgtatgataccatcatggtgtttccggaccagttcaagaaccatattctgtgtgataaagttcacatcctcaatgtcagctttcttgtaccacgcatgcgtcgtgaatttggaggctgtgccggcaacattgcgtacaatctgcatctgttgggtggtgctccgatccctatgggaacggtgggccaagatttcggtccgtatcgcgagcacttcgaaactctgggcattgacttatcccgcgtcaagatcatcgatgatctgtttacaccgcaggccttcattaccaccgaccatgataacaaccagattacggcgtttcatccaggcgcaatgatgcgttcgtacgaaaatcacgttcgtgatgtgccgggtgttaccttgggcctcgtaggtcctgatggacgcgagggcatgatccaaaatgccgaagaatttgctgctggtggcattccgttcatttttgacccaggtcaggcaatgccgctgttcaacggccccgaactgcgcgagtttatcgaacaggcggactatgtggtggtcaacgattacgaaagcaatcttcttcaagaacgtactggctggaacgagcaggacattgtttcacgcgtgcaggcgtatatcaccacgcaaggtcctaaaggagccctggtacatacaccggagaagacctacgatattccgccggcacacgaacgtcgtgtcgttgatccaactggttgcggcgacgcgtttcgcgccggcctgatctatggtattcagcataattatgattggttgaccattggccgcatgggaaacttaatgggtgcgctgaaagtggaacaccctggcacgcaaaatcagcgtttcgattttgccgaattcaacgaccagttcaaacaacagtttggctacgcgctc

SEQ ID NO: 8 - protein, 321 aa, synthetic construct
  REGION 1..321: note = Variant of adenosine kinase
MHHHHHHGGSGMSALICGSLAYDTIMVFPDQFKNHILCDKVHILNVSFLVPRMRREFGGCAGNIAYNLHLLGGAPIPMGTVGQDFGPYREHFETLGIDLSRVKIIDDLFTPQAFITTDHDNNQITAFHPGAMMRSYENHVRDVPGVTLGLVGPDGREGMIQNAEEFAAGGIPFIFDPGQAMPLFNGPELREFIEQADYVVVNDYESNLLQERTGWNEQDIVSRVQAYITTQGPKGALVHTPEKTYDIPPAHERRVVDPTGCGDAFRAGLIYGIQHNYDWLTIGRMGNLMGALKVEHPGTQNQRFDFAEFNDQFKQQFGYAL

SEQ ID NO: 9 - DNA, 963 bp, synthetic construct
  misc_feature 1..963: note = Variant of adenosine kinase
  source 1..963: mol_type = other DNA
atgcaccatcatcaccatcacgggggctccggcatgagtgcactgatttgcggttctttagcgtatgataccatcatggtgtttccggaccagttcaagaaccatattctgcccgataaagttcacatcctcaatgtcagctttcttgtaccacgcatgcgtcgtgaatttggaggctgtgccggcaacattgcgtacaatctgcatctgttgggtggtgctccgatccctatgggaacggtgggccaagatttcggtccgtatcgcgagcacttcgaaactctgggcattgacttatcccgcgtcaaggctatcgatgatctgtttacagctcaggccttcattaccaccgaccatgataacaaccagattacggcgtttcatccaggcgcaatgatgcgttcgtacgaaaatcacgttcgtgatgtgccgggtgttaccttgggcctcgtaggtcctgatggacgcgagggcatgatccaaaatgccgaagaatttgctgctggtggcattccgttcatttttgacccaggtcaggcaatgccgctgttcaacggccccgaactgcgcgagtttatcgaacaggcggactatgtggtggtcaacgattacgaaagcaatcttcttcaagaacgtactggctggaacgagcaggacattgtttcacgcgtgcaggcgtatatcaccacgcaaggtcctaaaggagccctggtacatacaccggagaagacctacgatattccgccggcacacgaacgtcgtgtcgttgatccaactggttgcggcgacgcgtttcgcgccggcctgatctatggtattcagcataattatgattggttgaccattggccgcatgggaaacttaatgggtgcgctgaaagtggaacaccctggcacgcaaaatcagcgtttcgattttgccgaattcaacgaccagttcaaacaacagtttggctacgcgctc

SEQ ID NO: 10 - protein, 321 aa, synthetic construct
  REGION 1..321: note = Variant of adenosine kinase
MHHHHHHGGSGMSALICGSLAYDTIMVFPDQFKNHILPDKVHILNVSFLVPRMRREFGGCAGNIAYNLHLLGGAPIPMGTVGQDFGPYREHFETLGIDLSRVKAIDDLFTAQAFITTDHDNNQITAFHPGAMMRSYENHVRDVPGVTLGLVGPDGREGMIQNAEEFAAGGIPFIFDPGQAMPLFNGPELREFIEQADYVVVNDYESNLLQERTGWNEQDIVSRVQAYITTQGPKGALVHTPEKTYDIPPAHERRVVDPTGCGDAFRAGLIYGIQHNYDWLTIGRMGNLMGALKVEHPGTQNQRFDFAEFNDQFKQQFGYAL

SEQ ID NO: 11 - DNA, 963 bp, synthetic construct
  misc_feature 1..963: note = Variant of adenosine kinase
  source 1..963: mol_type = other DNA
atgcaccatcatcaccatcacgggggctccggcatgagtgcactgatttgcggttctttagcgtatgataccatcatggtgtttccggaccagttcaagaaccatattctgcccgataaagttcacatcctcaatgtcagctttcttgtaccacgcatgcgtcgtgaatttggaggctgtgccggcaacattgcgtacaatctgcatctgttgggtggtgctccgatccctatgggaacggtgggccaagatttcggtccgtatcgcgagcacttcgaaactctgggcattgacttatcccgcgtcaagtatatcgatgatctgtttacagctcaggccttcattaccaccgaccatgataacaaccagattacggcgtttcatccaggcgcaatgatgcgttcgtacgaaaatcacgttcgtgatgtgccgggtgttaccttgggcctcgtaggtcctgatggacgcgagggcatgatccaaaatgccgaagaatttgctgctggtggcattccgttcatttttgacccaggtcaggcaatgccgctgttcaacggccccgaactgcgcgagtttatcgaacaggcggactatgtggtggtcaacgattacgaaagcaatcttcttcaagaacgtactggctggaacgagcaggacattgtttcacgcgtgcaggcgtatatcaccacgcaaggtcctaaaggagccctggtacatacaccggagaagacctacgatattccgccggcacacgaacgtcgtgtcgttgatccaactggttgcggcgacgcgtttcgcgccggcctgatctatggtattcagcataattatgattggttgaccattggccgcatgggaaacttaatgggtgcgctgaaagtggaacaccctggcacgcaaaatcagcgtttcgattttgccgaattcaacgaccagttcaaacaacagtttggctacgcgctc

SEQ ID NO: 12 - protein, 321 aa, synthetic construct
  REGION 1..321: note = Variant of adenosine kinase
MHHHHHHGGSGMSALICGSLAYDTIMVFPDQFKNHILPDKVHILNVSFLVPRMRREFGGCAGNIAYNLHLLGGAPIPMGTVGQDFGPYREHFETLGIDLSRVKYIDDLFTAQAFITTDHDNNQITAFHPGAMMRSYENHVRDVPGVTLGLVGPDGREGMIQNAEEFAAGGIPFIFDPGQAMPLFNGPELREFIEQADYVVVNDYESNLLQERTGWNEQDIVSRVQAYITTQGPKGALVHTPEKTYDIPPAHERRVVDPTGCGDAFRAGLIYGIQHNYDWLTIGRMGNLMGALKVEHPGTQNQRFDFAEFNDQFKQQFGYAL

SEQ ID NO: 13 - DNA, 963 bp, synthetic construct
  misc_feature 1..963: note = Variant of adenosine kinase
  source 1..963: mol_type = other DNA
atgcaccatcatcaccatcacgggggctccggcatgagtgcactgatttgcggttctttagcgtatgataccatcatggtgtttccggaccagttcaagaaccatattctgcccgatcgggttcacatcctcaatgtcagctttcttgtaccacgcatgcgtcgtgaatttggaggctgtgccggcaacattgcgtacaatctgcatctgttgggtggtgctccgatccctatgggaacggtgggccaagatttcggtccgtatcgcgagcacttcgaaactctgggcattgacttatcccgcgtcaagatcatcgatgatctgtttacaccgcaggccttcattaccaccgaccatgataacaaccagattacggcgtttcatccaggcgcaatgatgcgttcgtacgaaaatcacgttcgtgatgtgccgggtgttaccttgggcctcgtaggtcctgatggacgcgagggcatgatccaaaatgccgaagaatttgctgctggtggcattccgttcatttttgacccaggtcaggcaatgccgctgttcaacggccccgaactgcgcgagtttatcgaacaggcggactatgtggtggtcaacgattacgaaagcaatcttcttcaagaacgtactggctggaacgagcaggacattgtttcacgcgtgcaggcgtatatcaccacgcaaggtcctaaaggagccctggtacatacaccggagaagacctacgatattccgccggcacacgaacgtcgtgtcgttgatccaactggttgcggcgacgcgtttcgcgccggcctgatctatggtattcagcataattatgattggttgaccattggccgcatgggaaacttaatgggtgcgctgaaagtggaacaccctggcacgcaaaatcagcgtttcgattttgccgaattcaacgaccagttcaaacaacagtttggctacgcgctc

SEQ ID NO: 14 - protein, 321 aa, synthetic construct
  REGION 1..321: note = Variant of adenosine kinase
MHHHHHHGGSGMSALICGSLAYDTIMVFPDQFKNHILPDRVHILNVSFLVPRMRREFGGCAGNIAYNLHLLGGAPIPMGTVGQDFGPYREHFETLGIDLSRVKIIDDLFTPQAFITTDHDNNQITAFHPGAMMRSYENHVRDVPGVTLGLVGPDGREGMIQNAEEFAAGGIPFIFDPGQAMPLFNGPELREFIEQADYVVVNDYESNLLQERTGWNEQDIVSRVQAYITTQGPKGALVHTPEKTYDIPPAHERRVVDPTGCGDAFRAGLIYGIQHNYDWLTIGRMGNLMGALKVEHPGTQNQRFDFAEFNDQFKQQFGYAL

SEQ ID NO: 15 - DNA, 963 bp, synthetic construct
  misc_feature 1..963: note = Variant of adenosine kinase
  source 1..963: mol_type = other DNA
atgcaccatcatcaccatcacgggggctccggcatgagtgcactgatttgcggttctttagcgtatgataccatcatggtgtttccggaccagttcaagaaccatattctgcccgataaagttcacatcctcaatgtcagctttcttgtaccacgcatgcgtcgtgaatttggaggctgtgccggcaacattgcgtacaatctgcatctgttgggtggtgctccgatccctatgggaacggtgggccaagatttcggtccgtatcgcgagcacttcgaaactctgggcattgacttatcccgcgtcaagatcatcgatgatctgtttacaggtcaggccttcattaccaccgaccatgataacaaccagattacggcgtttcatccaggcgcaatgatgcgttcgtacgaaaatcacgttcgtgatgtgccgggtgttaccttgggcctcgtaggtcctgatggacgcgagggcatgatccaaaatgccgaagaatttgctgctggtggcattccgttcatttttgacccaggtcaggcaatgccgctgttcaacggccccgaactgcgcgagtttatcgaacaggcggactatgtggtggtcaacgattacgaaagcaatcttcttcaagaacgtactggctggaacgagcaggacattgtttcacgcgtgcaggcgtatatcaccacgcaaggtcctaaaggagccctggtacatacaccggagaagacctacgatattccgccggcacacgaacgtcgtgtcgttgatccaactggttgcggcgacgcgtttcgcgccggcctgatctatggtattcagcataattatgattggttgaccattggccgcatgggaaacttaatgggtgcgctgaaagtggaacaccctggcacgcaaaatcagcgtttcgattttgccgaattcaacgaccagttcaaacaacagtttggctacgcgctc

SEQ ID NO: 16 - protein, 321 aa, synthetic construct
  REGION 1..321: note = Variant of adenosine kinase
MHHHHHHGGSGMSALICGSLAYDTIMVFPDQFKNHILPDKVHILNVSFLVPRMRREFGGCAGNIAYNLHLLGGAPIPMGTVGQDFGPYREHFETLGIDLSRVKIIDDLFTGQAFITTDHDNNQITAFHPGAMMRSYENHVRDVPGVTLGLVGPDGREGMIQNAEEFAAGGIPFIFDPGQAMPLFNGPELREFIEQADYVVVNDYESNLLQERTGWNEQDIVSRVQAYITTQGPKGALVHTPEKTYDIPPAHERRVVDPTGCGDAFRAGLIYGIQHNYDWLTIGRMGNLMGALKVEHPGTQNQRFDFAEFNDQFKQQFGYAL

SEQ ID NO: 17 - DNA, 963 bp, synthetic construct
  misc_feature 1..963: note = Variant of adenosine kinase
  source 1..963: mol_type = other DNA
atgcaccatcatcaccatcacgggggctccggcatgagtgcactgatttgcggttctttagcgtatgataccatcatggtgtttccggaccagttcaagaaccatattctgcccgataaagttcacatcctcaatgtcagctttcttgtaccacgcatgcgtcgtgaatttggaggctgtgccggcaacattgcgtacaatctgcatctgttgggtggtgctccgatccctatgggaacggtgggccaagatttcggtccgtatcgcgagcacttcgaaactctgggcattgacttatcccgcgtcaagatcatcgatgatctgagtacagctcaggccttcattaccaccgaccatgataacaaccagattacggcgtttcatccaggcgcaatgatgcgttcgtacgaaaatcacgttcgtgatgtgccgggtgttaccttgggcctcgtaggtcctgatggacgcgagggcatgatccaaaatgccgaagaatttgctgctggtggcattccgttcatttttgacccaggtcaggcaatgccgctgttcaacggccccgaactgcgcgagtttatcgaacaggcggactatgtggtggtcaacgattacgaaagcaatcttcttcaagaacgtactggctggaacgagcaggacattgtttcacgcgtgcaggcgtatatcaccacgcaaggtcctaaaggagccctggtacatacaccggagaagacctacgatattccgccggcacacgaacgtcgtgtcgttgatccaactggttgcggcgacgcgtttcgcgccggcctgatctatggtattcagcataattatgattggttgaccattggccgcatgggaaacttaatgggtgcgctgaaagtggaacaccctggcacgcaaaatcagcgtttcgattttgccgaattcaacgaccagttcaaacaacagtttggctacgcgctc

SEQ ID NO: 18 - protein, 321 aa, synthetic construct
  REGION 1..321: note = Variant of adenosine kinase
MHHHHHHGGSGMSALICGSLAYDTIMVFPDQFKNHILPDKVHILNVSFLVPRMRREFGGCAGNIAYNLHLLGGAPIPMGTVGQDFGPYREHFETLGIDLSRVKIIDDLSTAQAFITTDHDNNQITAFHPGAMMRSYENHVRDVPGVTLGLVGPDGREGMIQNAEEFAAGGIPFIFDPGQAMPLFNGPELREFIEQADYVVVNDYESNLLQERTGWNEQDIVSRVQAYITTQGPKGALVHTPEKTYDIPPAHERRVVDPTGCGDAFRAGLIYGIQHNYDWLTIGRMGNLMGALKVEHPGTQNQRFDFAEFNDQFKQQFGYAL

SEQ ID NO: 19 - DNA, 963 bp, synthetic construct
  misc_feature 1..963: note = Variant of adenosine kinase
  source 1..963: mol_type = other DNA
atgcaccatcatcaccatcacgggggctccggcatgagtgcactgatttgcggttctttagcgtatgataccatcatggtgtttccggaccagttcaagaaccatattctgcccgataaagttcacatcctcaatgtcagctttcttgtaccacgcatgcgtcatgaatttggaggctgtgccggcaacattgcgtacaatctgcatctgttgggtggtgctccgatccctatgggaacggtgggccaagatttcggtccgtatcgcgagcacttcgaaactctgggcattgacttatcccgcgtcaagatcatcgatgatctgtttacaccgcaggccttcattaccaccgaccatgataacaaccagattacggcgtttcatccaggcgcaatgatgcgttcgtacgaaaatcacgttcgtgatgtgccgggtgttaccttgggcctcgtaggtcctgatggacgcgagggcatgatccaaaatgccgaagaatttgctgctggtggcattccgttcatttttgacccaggtcaggcaatgccgctgttcaacggccccgaactgcgcgagtttatcgaacaggcggactatgtggtggtcaacgattacgaaagcaatcttcttcaagaacgtactggctggaacgagcaggacattgtttcacgcgtgcaggcgtatatcaccacgcaaggtcctaaaggagccctggtacatacaccggagaagacctacgatattccgccggcacacgaacgtcgtgtcgttgatccaactggttgcggcgacgcgtttcgcgccggcctgatctatggtattcagcataattatgattggttgaccattggccgcatgggaaacttaatgggtgcgctgaaagtggaacaccctggcacgcaaaatcagcgtttcgattttgccgaattcaacgaccagttcaaacaatcgtttggctacgcgctc

SEQ ID NO: 20 - protein, 321 aa, synthetic construct
  REGION 1..321: note = Variant of adenosine kinase
MHHHHHHGGSGMSALICGSLAYDTIMVFPDQFKNHILPDKVHILNVSFLVPRMRHEFGGCAGNIAYNLHLLGGAPIPMGTVGQDFGPYREHFETLGIDLSRVKIIDDLFTPQAFITTDHDNNQITAFHPGAMMRSYENHVRDVPGVTLGLVGPDGREGMIQNAEEFAAGGIPFIFDPGQAMPLFNGPELREFIEQADYVVVNDYESNLLQERTGWNEQDIVSRVQAYITTQGPKGALVHTPEKTYDIPPAHERRVVDPTGCGDAFRAGLIYGIQHNYDWLTIGRMGNLMGALKVEHPGTQNQRFDFAEFNDQFKQSFGYAL

SEQ ID NO: 21 - DNA, 963 bp, synthetic construct
  misc_feature 1..963: note = Variant of adenosine kinase
  source 1..963: mol_type = other DNA
atgcaccatcatcaccatcacgggggctccggcatgagtgcactgatttgcggttctttagcgtatgataccatcatggtgtttccggaccagttcaagaaccatattctgcccgataaagttcacatcctcaatgtcagctttcttgtaccacgcatgcgtcgtgaatttggaggctgtgccggcaacattgcgtacaatctgcatctgttgggtggtgctccgatccctatgggaacggtgggccaagatttcggtccgtatcgcgagcacttcgaaactctgggcattgacttatcccgcgtcaagatcatcgatgatctggggacagctcaggccttcattaccaccgaccatgataacaaccagattacggcgtttcatccaggcgcaatgatgcgttcgtacgaaaatcacgttcgtgatgtgccgggtgttaccttgggcctcgtaggtcctgatggacgcgagggcatgatccaaaatgccgaagaatttgctgctggtggcattccgttcatttttgacccaggtcaggcaatgccgctgttcaacggccccgaactgcgcgagtttatcgaacaggcggactatgtggtggtcaacgattacgaaagcaatcttcttcaagaacgtactggctggaacgagcaggacattgtttcacgcgtgcaggcgtatatcaccacgcaaggtcctaaaggagccctggtacatacaccggagaagacctacgatattccgccggcacacgaacgtcgtgtcgttgatccaactggttgcggcgacgcgtttcgcgccggcctgatctatggtattcagcataattatgattggttgaccattggccgcatgggaaacttaatgggtgcgctgaaagtggaacaccctggcacgcaaaatcagcgtttcgattttgccgaattcaacgaccagttcaaacaacagtttggctacgcgctc

SEQ ID NO: 22 - protein, 321 aa, synthetic construct
  REGION 1..321: note = Variant of adenosine kinase
MHHHHHHGGSGMSALICGSLAYDTIMVFPDQFKNHILPDKVHILNVSFLVPRMRREFGGCAGNIAYNLHLLGGAPIPMGTVGQDFGPYREHFETLGIDLSRVKIIDDLGTAQAFITTDHDNNQITAFHPGAMMRSYENHVRDVPGVTLGLVGPDGREGMIQNAEEFAAGGIPFIFDPGQAMPLFNGPELREFIEQADYVVVNDYESNLLQERTGWNEQDIVSRVQAYITTQGPKGALVHTPEKTYDIPPAHERRVVDPTGCGDAFRAGLIYGIQHNYDWLTIGRMGNLMGALKVEHPGTQNQRFDFAEFNDQFKQQFGYAL

SEQ ID NO: 23 - DNA, 963 bp, synthetic construct
  misc_feature 1..963: note = Variant of adenosine kinase
  source 1..963: mol_type = other DNA
atgcaccatcatcaccatcacgggggctccggcatgagtgcactgatttgcggttctttagcgtatgataccatcatggtgtttccggaccagttcaagaaccatattctgcccgataaagttcacatcctcaatgtcagctttcttgtaccacgcatgcgtcgtgaatttggaggctgtgccggcaacattgcgtacaatctgcatctgttgggtggtgctccgatccctatgggaacggtgggccaagatttcggtccgtatcgcgagcacttcgaaactctgggcattgacttatcccgcgtcaagatcatcgatgatctgtttacaccgcaggccttcattaccaccgaccatgataacaaccagattacggcgtttcatccaggcgcaatgatgcgttcgtacgaaaatcacgttcgtgatgtgccgggtgttaccttgggcctcgtaggtcctgatggacgcgagggcatgatccaaaatgccgaagaatttgctgctggtggcattccgttcatttttgacccaggtcaggcaatgccgctgttcaacggccccgaactgcgcgagtttatcgaacaggcggactatgtggtggtcaacgattacgaaagcaatcttcttcaagaacgtactggctggaacgagcaggacattgtttcacgcgtgcaggcgtatatcaccacgcaaggtcctaaaggagccctggtacatacaccggagaagacctacgatattccgccggcacacgaacgtcgtgtcgttgatgttactggttgcggcgacgcgtttcgcgccggcctgatctatggtattcagcataattatgattggttgaccattggccgcatgggaaacttaatgggtgcgctgaaagtggaacaccctggcacgcaaaatcagcgtttcgattttgccgaattcaacgaccagttcaaacaacagtttggctacgcgctc

SEQ ID NO: 24 - protein, 321 aa, synthetic construct
  REGION 1..321: note = Variant of adenosine kinase
MHHHHHHGGSGMSALICGSLAYDTIMVFPDQFKNHILPDKVHILNVSFLVPRMRREFGGCAGNIAYNLHLLGGAPIPMGTVGQDFGPYREHFETLGIDLSRVKIIDDLFTPQAFITTDHDNNQITAFHPGAMMRSYENHVRDVPGVTLGLVGPDGREGMIQNAEEFAAGGIPFIFDPGQAMPLFNGPELREFIEQADYVVVNDYESNLLQERTGWNEQDIVSRVQAYITTQGPKGALVHTPEKTYDIPPAHERRVVDVTGCGDAFRAGLIYGIQHNYDWLTIGRMGNLMGALKVEHPGTQNQRFDFAEFNDQFKQQFGYAL

SEQ ID NO: 25 - DNA, 963 bp, synthetic construct
  misc_feature 1..963: note = Variant of adenosine kinase
  source 1..963: mol_type = other DNA
atgcaccatcatcaccatcacgggggctccggcatgagtgcactgatttgcggttctttagcgtatgataccatcatggtgtttccggaccagttcaagaaccatattctgcccgataaagttcacatcctcaatgtcagctttcttgtaccacgcatgcgtcgtgaatttggaggctgtgccggcaacattgcgtacaatctgcatctgttgggtggtgctccgatccctatgggaacggtgggccaagatttcggtccgtatcgcgagcacttcgaaactctgggcattgacttatcccgcgtcaagatcatcgaggatctgtttacagctcaggccttcattaccaccgaccatgataacaaccagattacggcgtttcatccaggcgcaatgatgcgttcgtacgaaaatcacgttcgtgatgtgccgggtgttaccttgggcctcgtaggtcctgatggacgcgagggcatgatccaaaatgccgaagaatttgctgctggtggcattccgttcatttttgacccaggtcaggcaatgccgctgttcaacggccccgaactgcgcgagtttatcgaacaggcggactatgtggtggtcaacgattacgaaagcaatcttcttcaagaacgtactggctggaacgagcaggacattgtttcacgcgtgcaggcgtatatcaccacgcaaggtcctaaaggagccctggtacatacaccggagaagacctacgatattccgccggcacacgaacgtcgtgtcgttgatccaactggttgcggcgacgcgtttcgcgccggcctgatctatggtattcagcataattatgattggttgaccattggccgcatgggaaacttaatgggtgcgctgaaagtggaacaccctggcacgcaaaatcagcgtttcgattttgccgaattcaacgaccagttcaaacaacagtttggctacgcgctc

SEQ ID NO: 26 - protein, 321 aa, synthetic construct
  REGION 1..321: note = Variant of adenosine kinase
MHHHHHHGGSGMSALICGSLAYDTIMVFPDQFKNHILPDKVHILNVSFLVPRMRREFGGCAGNIAYNLHLLGGAPIPMGTVGQDFGPYREHFETLGIDLSRVKIIEDLFTAQAFITTDHDNNQITAFHPGAMMRSYENHVRDVPGVTLGLVGPDGREGMIQNAEEFAAGGIPFIFDPGQAMPLFNGPELREFIEQADYVVVNDYESNLLQERTGWNEQDIVSRVQAYITTQGPKGALVHTPEKTYDIPPAHERRVVDPTGCGDAFRAGLIYGIQHNYDWLTIGRMGNLMGALKVEHPGTQNQRFDFAEFNDQFKQQFGYAL

SEQ ID NO: 27 - DNA, 963 bp, synthetic construct
  misc_feature 1..963: note = Variant of adenosine kinase
  source 1..963: mol_type = other DNA
atgcaccatcatcaccatcacgggggctccggcatgagtgcactgatttgcggttctttagcgtatgataccatcatggtgtttccggaccagttcaagaaccatattctgcccgataaagttcacatcctcaatgtcagctttcttgtaccacgcatgcgtcgtgaatttggaggctgtgccggcaacattgcgtacaatctgcatctgttgggtggtgctccgatccctatgggaacggtgggccaagatttcggtccgtatcgcgagcacttcgaaactctgggcattgacttatcccgcgtcaagaatatcgatgatctgtttacagctcaggccttcattaccaccgaccatgataacaaccagattacggcgtttcatccaggcgcaatgatgcgttcgtacgaaaatcacgttcgtgatgtgccgggtgttaccttgggcctcgtaggtcctgatggacgcgagggcatgatccaaaatgccgaagaatttgctgctggtggcattccgttcatttttgacccaggtcaggcaatgccgctgttcaacggccccgaactgcgcgagtttatcgaacaggcggactatgtggtggtcaacgattacgaaagcaatcttcttcaagaacgtactggctggaacgagcaggacattgtttcacgcgtgcaggcgtatatcaccacgcaaggtcctaaaggagccctggtacatacaccggagaagacctacgatattccgccggcacacgaacgtcgtgtcgttgatccaactggttgcggcgacgcgtttcgcgccggcctgatctatggtattcagcataattatgattggttgaccattggccgcatgggaaacttaatgggtgcgctgaaagtggaacaccctggcacgcaaaatcagcgtttcgattttgccgaattcaacgaccagttcaaacaacagtttggctacgcgctc

SEQ ID NO: 28 - protein, 321 aa, synthetic construct
  REGION 1..321: note = Variant of adenosine kinase
MHHHHHHGGSGMSALICGSLAYDTIMVFPDQFKNHILPDKVHILNVSFLVPRMRREFGGCAGNIAYNLHLLGGAPIPMGTVGQDFGPYREHFETLGIDLSRVKNIDDLFTAQAFITTDHDNNQITAFHPGAMMRSYENHVRDVPGVTLGLVGPDGREGMIQNAEEFAAGGIPFIFDPGQAMPLFNGPELREFIEQADYVVVNDYESNLLQERTGWNEQDIVSRVQAYITTQGPKGALVHTPEKTYDIPPAHERRVVDPTGCGDAFRAGLIYGIQHNYDWLTIGRMGNLMGALKVEHPGTQNQRFDFAEFNDQFKQQFGYAL

SEQ ID NO: 29 - DNA, 963 bp, synthetic construct
  misc_feature 1..963: note = Variant of adenosine kinase
  source 1..963: mol_type = other DNA
atgcaccatcatcaccatcacgggggctccggcatgagtgcactgatttgcggttctttagcgtatgataccatcatggtgtttccggaccagttcaagaaccatattctgcccgataaagttcacatcctcaatgtcagctttcttgtaccacgcatgcgtcgtgaatttggaggctgtgccggcaacattgcgtacaatctgcatctgttgggtggtgctccgatccctatgggaacggtgggccaagatttcggtccgtatcgcgagcacttcgaaactctgggcattgacttatcccgcgtcaagatcatcgatgatctgacgacagctcaggccttcattaccaccgaccatgataacaaccagattacggcgtttcatccaggcgcaatgatgcgttcgtacgaaaatcacgttcgtgatgtgccgggtgttaccttgggcctcgtaggtcctgatggacgcgagggcatgatccaaaatgccgaagaatttgctgctggtggcattccgttcatttttgacccaggtcaggcaatgccgctgttcaacggccccgaactgcgcgagtttatcgaacaggcggactatgtggtggtcaacgattacgaaagcaatcttcttcaagaacgtactggctggaacgagcaggacattgtttcacgcgtgcaggcgtatatcaccacgcaaggtcctaaaggagccctggtacatacaccggagaagacctacgatattccgccggcacacgaacgtcgtgtcgttgatccaactggttgcggcgacgcgtttcgcgccggcctgatctatggtattcagcataattatgattggttgaccattggccgcatgggaaacttaatgggtgcgctgaaagtggaacaccctggcacgcaaaatcagcgtttcgattttgccgaattcaacgaccagttcaaacaacagtttggctacgcgctc

SEQ ID NO: 30 - protein, 321 aa, synthetic construct
  REGION 1..321: note = Variant of adenosine kinase
MHHHHHHGGSGMSALICGSLAYDTIMVFPDQFKNHILPDKVHILNVSFLVPRMRREFGGCAGNIAYNLHLLGGAPIPMGTVGQDFGPYREHFETLGIDLSRVKIIDDLTTAQAFITTDHDNNQITAFHPGAMMRSYENHVRDVPGVTLGLVGPDGREGMIQNAEEFAAGGIPFIFDPGQAMPLFNGPELREFIEQADYVVVNDYESNLLQERTGWNEQDIVSRVQAYITTQGPKGALVHTPEKTYDIPPAHERRVVDPTGCGDAFRAGLIYGIQHNYDWLTIGRMGNLMGALKVEHPGTQNQRFDFAEFNDQFKQQFGYAL

SEQ ID NO: 31 - DNA, 963 bp, synthetic construct
  misc_feature 1..963: note = Variant of adenosine kinase
  source 1..963: mol_type = other DNA
atgcaccatcatcaccatcacgggggctccggcatgagtgcactgatttgcggttctttagcgtatgataccatcatggtgtttccggaccagttcaagaaccatattctgcccgataaagttcacatcctcaatgtcagctttcttgtaccacgcatgcgtcgtgaatttggaggctgtgccggcaacattgcgtacaatctgcatctgttgggtggtgctccgatccctatgggaacggtgggccaagatttcggtccgtatcgcgagcacttcgaaactctgggcattgacttatcccgcgtcaagatcatcgatgatctgcctacagctcaggccttcattaccaccgaccatgataacaaccagattacggcgtttcatccaggcgcaatgatgcgttcgtacgaaaatcacgttcgtgatgtgccgggtgttaccttgggcctcgtaggtcctgatggacgcgagggcatgatccaaaatgccgaagaatttgctgctggtggcattccgttcatttttgacccaggtcaggcaatgccgctgttcaacggccccgaactgcgcgagtttatcgaacaggcggactatgtggtggtcaacgattacgaaagcaatcttcttcaagaacgtactggctggaacgagcaggacattgtttcacgcgtgcaggcgtatatcaccacgcaaggtcctaaaggagccctggtacatacaccggagaagacctacgatattccgccggcacacgaacgtcgtgtcgttgatccaactggttgcggcgacgcgtttcgcgccggcctgatctatggtattcagcataattatgattggttgaccattggccgcatgggaaacttaatgggtgcgctgaaagtggaacaccctggcacgcaaaatcagcgtttcgattttgccgaattcaacgaccagttcaaacaacagtttggctacgcgctc

SEQ ID NO: 32 - protein, 321 aa, synthetic construct
  REGION 1..321: note = Variant of adenosine kinase
MHHHHHHGGSGMSALICGSLAYDTIMVFPDQFKNHILPDKVHILNVSFLVPRMRREFGGCAGNIAYNLHLLGGAPIPMGTVGQDFGPYREHFETLGIDLSRVKIIDDLPTAQAFITTDHDNNQITAFHPGAMMRSYENHVRDVPGVTLGLVGPDGREGMIQNAEEFAAGGIPFIFDPGQAMPLFNGPELREFIEQADYVVVNDYESNLLQERTGWNEQDIVSRVQAYITTQGPKGALVHTPEKTYDIPPAHERRVVDPTGCGDAFRAGLIYGIQHNYDWLTIGRMGNLMGALKVEHPGTQNQRFDFAEFNDQFKQQFGYAL

SEQ ID NO: 33 - DNA, 963 bp, synthetic construct
  misc_feature 1..963: note = Variant of adenosine kinase
  source 1..963: mol_type = other DNA
atgcaccatcatcaccatcacgggggctccggcatgagtgcactgatttgcggttctttagcgtatgataccatcatggtgtttccggaccagttcaagaaccatattctgcccgataaagttcacatcctcaatgtcagctttcttgtaccacgcatgcgtcgtgaatttggaggctgtgccggcaacattgcgtacaatctgcatctgttgggtggtgctccgatccctatgggaacggtgggccaagatttcggtccgtatcgcgagcacttcgaaactctgggcattgacttatcccgcgtccagatcatcgatgatctgtttacagcgcaggccttcattaccaccgaccatgataacaaccagattacggcgtttcatccaggcgcaatgatgcgttcgtacgaaaatcacgttcgtgatgtgccgggtgttaccttgggcctcgtaggtcctgatggacgcgagggcatgatccaaaatgccgaagaatttgctgctggtggcattccgttcatttttgacccaggtcaggcaatgccgctgttcaacggccccgaactgcgcgagtttatcgaacaggcggactatgtggtggtcaacgattacgaaagcaatcttcttcaagaacgtactggctggaacgagcaggacattgtttcacgcgtgcaggcgtatatcaccacgcaaggtcctaaaggagccctggtacatacaccggagaagacctacgatattccgccggcacacgaacgtcgtgtcgttgatccaactggttgcggcgacgcgtttcgcgccggcctgatctatggtattcagcataattatgattggttgaccattggccgcatgggaaacttaatgggtgcgctgaaagtggaacaccctggcacgcaaaatcagcgtttcgattttgccgaattcaacgaccagttcaaacaacagtttggctacgcgctc

SEQ ID NO: 34 - protein, 321 aa, synthetic construct
  REGION 1..321: note = Variant of adenosine kinase
MHHHHHHGGSGMSALICGSLAYDTIMVFPDQFKNHILPDKVHILNVSFLVPRMRREFGGCAGNIAYNLHLLGGAPIPMGTVGQDFGPYREHFETLGIDLSRVQIIDDLFTAQAFITTDHDNNQITAFHPGAMMRSYENHVRDVPGVTLGLVGPDGREGMIQNAEEFAAGGIPFIFDPGQAMPLFNGPELREFIEQADYVVVNDYESNLLQERTGWNEQDIVSRVQAYITTQGPKGALVHTPEKTYDIPPAHERRVVDPTGCGDAFRAGLIYGIQHNYDWLTIGRMGNLMGALKVEHPGTQNQRFDFAEFNDQFKQQFGYAL

SEQ ID NO: 35 - DNA, 963 bp, synthetic construct
  misc_feature 1..963: note = Variant of adenosine kinase
  source 1..963: mol_type = other DNA
atgcaccatcatcaccatcacgggggctccggcatgagtgcactgatttgcggttctttagcgtatgataccatcatggtgtttccggaccagttcaagaaccatattctgcccgataaagttcacatcctcaatgtcagctttcttgtaccacgcatgcgtcgtgaatttggaggctgtgccggcaacattgcgtacaatctgcatctgttgggtggtgctccgatccctatgggaacggtgggccaagatttcggtccgtatcgcgagcacttcgaaactctgggcattgacttatcccgcgtcaaggatatcgatgatctgtttacagctcaggccttcattaccaccgaccatgataacaaccagattacggcgtttcatccaggcgcaatgatgcgttcgtacgaaaatcacgttcgtgatgtgccgggtgttaccttgggcctcgtaggtcctgatggacgcgagggcatgatccaaaatgccgaagaatttgctgctggtggcattccgttcatttttgacccaggtcaggcaatgccgctgttcaacggccccgaactgcgcgagtttatcgaacaggcggactatgtggtggtcaacgattacgaaagcaatcttcttcaagaacgtactggctggaacgagcaggacattgtttcacgcgtgcaggcgtatatcaccacgcaaggtcctaaaggagccctggtacatacaccggagaagacctacgatattccgccggcacacgaacgtcgtgtcgttgatccaactggttgcggcgacgcgtttcgcgccggcctgatctatggtattcagcataattatgattggttgaccattggccgcatgggaaacttaatgggtgcgctgaaagtggaacaccctggcacgcaaaatcagcgtttcgattttgccgaattcaacgaccagttcaaacaacagtttggctacgcgctc

SEQ ID NO: 36 - protein, 321 aa, synthetic construct
  REGION 1..321: note = Variant of adenosine kinase
MHHHHHHGGSGMSALICGSLAYDTIMVFPDQFKNHILPDKVHILNVSFLVPRMRREFGGCAGNIAYNLHLLGGAPIPMGTVGQDFGPYREHFETLGIDLSRVKDIDDLFTAQAFITTDHDNNQITAFHPGAMMRSYENHVRDVPGVTLGLVGPDGREGMIQNAEEFAAGGIPFIFDPGQAMPLFNGPELREFIEQADYVVVNDYESNLLQERTGWNEQDIVSRVQAYITTQGPKGALVHTPEKTYDIPPAHERRVVDPTGCGDAFRAGLIYGIQHNYDWLTIGRMGNLMGALKVEHPGTQNQRFDFAEFNDQFKQQFGYAL

SEQ ID NO: 37 - DNA, 963 bp, synthetic construct
  misc_feature 1..963: note = Variant of adenosine kinase
  source 1..963: mol_type = other DNA
atgcaccatcatcaccatcacgggggctccggcatgagtgcactgatttgcggttctttagcgtatgataccatcatggtgtttccggaccagttcaagaaccatattctgcccgataaagttcacatcctcaatgtcagctttcttgtaccacgcatgcgtcgtgaatttggaggctgtgccggcaacattgcgtacaatctgcatctgttgggtggtgctccgatccctatgggaacggtgggccaagatttcggtccgtatcgcgagcacttcgaaactctgggcattgacttatcccgcgtcaagaggatcgatgatctgtttacagctcaggccttcattaccaccgaccatgataacaaccagattacggcgtttcatccaggcgcaatgatgcgttcgtacgaaaatcacgttcgtgatgtgccgggtgttaccttgggcctcgtaggtcctgatggacgcgagggcatgatccaaaatgccgaagaatttgctgctggtggcattccgttcatttttgacccaggtcaggcaatgccgctgttcaacggccccgaactgcgcgagtttatcgaacaggcggactatgtggtggtcaacgattacgaaagcaatcttcttcaagaacgtactggctggaacgagcaggacattgtttcacgcgtgcaggcgtatatcaccacgcaaggtcctaaaggagccctggtacatacaccggagaagacctacgatattccgccggcacacgaacgtcgtgtcgttgatccaactggttgcggcgacgcgtttcgcgccggcctgatctatggtattcagcataattatgattggttgaccattggccgcatgggaaacttaatgggtgcgctgaaagtggaacaccctggcacgcaaaatcagcgtttcgattttgccgaattcaacgaccagttcaaacaacagtttggctacgcgctc

SEQ ID NO: 38 - protein, 321 aa, synthetic construct
  REGION 1..321: note = Variant of adenosine kinase
MHHHHHHGGSGMSALICGSLAYDTIMVFPDQFKNHILPDKVHILNVSFLVPRMRREFGGCAGNIAYNLHLLGGAPIPMGTVGQDFGPYREHFETLGIDLSRVKRIDDLFTAQAFITTDHDNNQITAFHPGAMMRSYENHVRDVPGVTLGLVGPDGREGMIQNAEEFAAGGIPFIFDPGQAMPLFNGPELREFIEQADYVVVNDYESNLLQERTGWNEQDIVSRVQAYITTQGPKGALVHTPEKTYDIPPAHERRVVDPTGCGDAFRAGLIYGIQHNYDWLTIGRMGNLMGALKVEHPGTQNQRFDFAEFNDQFKQQFGYAL

SEQ ID NO: 39 - DNA, 963 bp, synthetic construct
  misc_feature 1..963: note = Variant of adenosine kinase
  source 1..963: mol_type = other DNA
atgcaccatcatcaccatcacgggggctccggcatgagtgcactgatttgcggttctttagcgtatgataccatcatggtgtttccggaccagttcaagaaccatattctgcccgataaagttcacatcctcaatgtcagctttcttgtaccacgcatgcgtcgtgaatttggaggctgtgccggcaacattgcgtacaatctgcatctgttgggtggtgctccgatccctatgggaacggtgggccaagatttcggtccgtatcgcgagcacttcgaaactctgggcattgacttatcccgcgtcaagatcatcgatgatctgtttacaccgcaggccttcattaccaccgaccatgattttaaccagattacggcgtttcatccaggcgcaatgatgcgttcgtacgaaaatcacgttcgtgatgtgccgggtgttaccttgggcctcgtaggtcctgatggacgcgagggcatgatccaaaatgccgaagaatttgctgctggtggcattccgttcatttttgacccaggtcaggcaatgccgctgttcaacggccccgaactgcgcgagtttatcgaacaggcggactatgtggtggtcaacgattacgaaagcaatcttcttcaagaacgtactggctggaacgagcaggacattgtttcacgcgtgcaggcgtatatcaccacgcaaggtcctaaaggagccctggtacatacaccggagaagacctacgatattccgccggcacacgaacgtcgtgtcgttgatccaactggttgcggcgacgcgtttcgcgccggcctgatctatggtattcagcataattatgattggttgaccattggccgcatgggaaacttaatgggtgcgctgaaagtggaacaccctggcacgcaaaatcagcgtttcgattttgccgaattcaacgaccagttcaaacaacagtttggctacgcgctc

SEQ ID NO: 40 - protein, 321 aa, synthetic construct
  REGION 1..321: note = Variant of adenosine kinase
MHHHHHHGGSGMSALICGSLAYDTIMVFPDQFKNHILPDKVHILNVSFLVPRMRREFGGCAGNIAYNLHLLGGAPIPMGTVGQDFGPYREHFETLGIDLSRVKIIDDLFTPQAFITTDHDFNQITAFHPGAMMRSYENHVRDVPGVTLGLVGPDGREGMIQNAEEFAAGGIPFIFDPGQAMPLFNGPELREFIEQADYVVVNDYESNLLQERTGWNEQDIVSRVQAYITTQGPKGALVHTPEKTYDIPPAHERRVVDPTGCGDAFRAGLIYGIQHNYDWLTIGRMGNLMGALKVEHPGTQNQRFDFAEFNDQFKQQFGYAL

SEQ ID NO: 41 - DNA, 963 bp, synthetic construct
  misc_feature 1..963: note = Variant of adenosine kinase
  source 1..963: mol_type = other DNA
atgcaccatcatcaccatcacgggggctccggcatgagtgcactgatttgcggttctttagcgtatgataccatcatggtgtttccggaccagttcaagaaccatattctgcccgataaagttcacatcctcaatgtcagctttcttgtaccacgcatgcgtcgtgaatttggaggctgtgccggcaacattgcgtacaatctgcatctgttgggtggtgctccgatccctatgggaacggtgggccaagatttcggtccgtatcgcgagcacttcgaaactctgggcattgacttatcccgcgtcaagtcgatcgatgatctgtttacagctcaggccttcattaccaccgaccatgataacaaccagattacggcgtttcatccaggcgcaatgatgcgttcgtacgaaaatcacgttcgtgatgtgccgggtgttaccttgggcctcgtaggtcctgatggacgcgagggcatgatccaaaatgccgaagaatttgctgctggtggcattccgttcatttttgacccaggtcaggcaatgccgctgttcaacggccccgaactgcgcgagtttatcgaacaggcggactatgtggtggtcaacgattacgaaagcaatcttcttcaagaacgtactggctggaacgagcaggacattgtttcacgcgtgcaggcgtatatcaccacgcaaggtcctaaaggagccctggtacatacaccggagaagacctacgatattccgccggcacacgaacgtcgtgtcgttgatccaactggttgcggcgacgcgtttcgcgccggcctgatctatggtattcagcataattatgattggttgaccattggccgcatgggaaacttaatgggtgcgctgaaagtggaacaccctggcacgcaaaatcagcgtttcgattttgccgaattcaacgaccagttcaaacaacagtttggctacgcgctc

SEQ ID NO: 42 - protein, 321 aa, synthetic construct
  REGION 1..321: note = Variant of adenosine kinase
MHHHHHHGGSGMSALICGSLAYDTIMVFPDQFKNHILPDKVHILNVSFLVPRMRREFGGCAGNIAYNLHLLGGAPIPMGTVGQDFGPYREHFETLGIDLSRVKSIDDLFTAQAFITTDHDNNQITAFHPGAMMRSYENHVRDVPGVTLGLVGPDGREGMIQNAEEFAAGGIPFIFDPGQAMPLFNGPELREFIEQADYVVVNDYESNLLQERTGWNEQDIVSRVQAYITTQGPKGALVHTPEKTYDIPPAHERRVVDPTGCGDAFRAGLIYGIQHNYDWLTIGRMGNLMGALKVEHPGTQNQRFDFAEFNDQFKQQFGYAL

SEQ ID NO: 43 - DNA, 963 bp, synthetic construct
  misc_feature 1..963: note = Variant of adenosine kinase
  source 1..963: mol_type = other DNA
atgcaccatcatcaccatcacgggggctccggcatgagtgcactgatttgcggttctttagcgtatgataccatcatggtgtttccggaccagttcaagaaccatattctgcccgataaagttcacatcctcaatgtcagctttcttgtaccacgcatgcgtcgtgaatttggaggctgtgccggcaacattgcgtacaatctgcatctgttgggtggtgctccgatccctatgggaacggtgggccaagatttcggtccgtatcgcgagcacttcgaaactctgggcattgacttatcccgcgtcaagacgatcgatgatctgtttacagctcaggccttcattaccaccgaccatgataacaaccagattacggcgtttcatccaggcgcaatgatgcgttcgtacgaaaatcacgttcgtgatgtgccgggtgttaccttgggcctcgtaggtcctgatggacgcgagggcatgatccaaaatgccgaagaatttgctgctggtggcattccgttcatttttgacccaggtcaggcaatgccgctgttcaacggccccgaactgcgcgagtttatcgaacaggcggactatgtggtggtcaacgattacgaaagcaatcttcttcaagaacgtactggctggaacgagcaggacattgtttcacgcgtgcaggcgtatatcaccacgcaaggtcctaaaggagccctggtacatacaccggagaagacctacgatattccgccggcacacgaacgtcgtgtcgttgatccaactggttgcggcgacgcgtttcgcgccggcctgatctatggtattcagcataattatgattggttgaccattggccgcatgggaaacttaatgggtgcgctgaaagtggaacaccctggcacgcaaaatcagcgtttcgattttgccgaattcaacgaccagttcaaacaacagtttggctacgcgctc

SEQ ID NO: 44 - protein, 321 aa, synthetic construct
  REGION 1..321: note = Variant of adenosine kinase
MHHHHHHGGSGMSALICGSLAYDTIMVFPDQFKNHILPDKVHILNVSFLVPRMRREFGGCAGNIAYNLHLLGGAPIPMGTVGQDFGPYREHFETLGIDLSRVKTIDDLFTAQAFITTDHDNNQITAFHPGAMMRSYENHVRDVPGVTLGLVGPDGREGMIQNAEEFAAGGIPFIFDPGQAMPLFNGPELREFIEQADYVVVNDYESNLLQERTGWNEQDIVSRVQAYITTQGPKGALVHTPEKTYDIPPAHERRVVDPTGCGDAFRAGLIYGIQHNYDWLTIGRMGNLMGALKVEHPGTQNQRFDFAEFNDQFKQQFGYAL

SEQ ID NO: 45 - DNA, 963 bp, synthetic construct
  misc_feature 1..963: note = Variant of adenosine kinase
  source 1..963: mol_type = other DNA
atgcaccatcatcaccatcacgggggctccggcatgagtgcactgatttgcggttctttagcgtatgataccatcatggtgtttccggaccagttcaagaaccatattctgcccgataaagttcacatcctcaatgtcagctttcttgtaccacgcatgcgtcgtgaatttggaggctgtgccggcaacattgcgtacaatctgcatctgttgggtggtgctccgatccctatgggaacggtgggccaagatttcggtccgtatcgcgagcacttcgaaactctgggcattgacttatcccgcgtcaagatcatcgatgatctgtttacaccgcaggccttcattaccaccgaccatgataacaaccagattacggcgtttcatccaggcgcaatgatgcgttcgtacgaaaatcacgttcgtgatgtgccgggtgttaccttgggcctcgtaggtcctgatggacgcgagggcatgatccaaaatgccgaagaatttgctgctggtggcattccgttcatttttgacccaggtcaggcaatgccgctgttcaacggccccgaactgcgcgagtttatcgaacaggcggactatgtggtggtcaacgattacgaaagccggcttcttcaagaacgtactggctggaacgagcaggacattgtttcacgcgtgcaggcgtatatcaccacgcaaggtcctaaaggagccctggtacatacaccggagaagacctacgatattccgccggcacacgaacgtcgtgtcgttgatccaactggttgcggcgacgcgtttcgcgccggcctgatctatggtattcagcataattatgattggttgaccattggccgcatgggaaacttaatgggtgcgctgaaagtggaacaccctggcacgcaaaatcagcgtttcgattttgccgaattcaacgaccagttcaaacaacagtttggctacgcgctc

SEQ ID NO: 46 - protein, 321 aa, synthetic construct
  REGION 1..321: note = Variant of adenosine kinase
MHHHHHHGGSGMSALICGSLAYDTIMVFPDQFKNHILPDKVHILNVSFLVPRMRREFGGCAGNIAYNLHLLGGAPIPMGTVGQDFGPYREHFETLGIDLSRVKIIDDLFTPQAFITTDHDNNQITAFHPGAMMRSYENHVRDVPGVTLGLVGPDGREGMIQNAEEFAAGGIPFIFDPGQAMPLFNGPELREFIEQADYVVVNDYESRLLQERTGWNEQDIVSRVQAYITTQGPKGALVHTPEKTYDIPPAHERRVVDPTGCGDAFRAGLIYGIQHNYDWLTIGRMGNLMGALKVEHPGTQNQRFDFAEFNDQFKQQFGYAL

SEQ ID NO: 47 - DNA, 963 bp, synthetic construct
  misc_feature 1..963: note = Variant of adenosine kinase
  source 1..963: mol_type = other DNA
atgcaccatcatcaccatcacgggggctccggcatgagtgcactgatttgcggttctttagcgtatgataccatcatggtgtttccggaccagttcaagaaccatattctgcccgataaagttcacatcctcaatgtcagctttcttgtaccacgcatgcgtcgtgaatttggaggctgtgccggcaacattgcgtacaatctgcatctgttgggtggtgctccgatccctatgggaacggtgggccaagatttcggtccgtatcgcgagcacttcgaaactctgggcattgacttatcccgcgtcaagatcatcgatgatctgtttacagcgcaggccttcattaccaccgaccatgataacaaccagattacggcgtttcatccaggcgcaatgatgcgttcgtacgaaaatcacgttcgtgatgtgccgggtgttaccttgggcctcgtaggtcctgatggacgcgagggcatgatccaaaatgccgaagaatttgctgctggtggcattccgttcatttttgacccaggtcaggcaatgccgctgttcaacggccccgaactgcgcgagtttatcgaacaggcggactatgtggtggtcaacgattacgaaagcaatcttcttcaagaacgtactggctggaacgagcaggacattgtttcacgcgtgcaggcgtatatcaccacgcaaggtcctaaaggagccctggtacatacaccggagaagacctacgatattccgccggcacacgaacgtcgtgtcgttgatccaactggttgcggcgacgcgtttcgcgccggcctgatctatggtattcagcataattatgattggttgaccattggccgcatgggaaacttaatgggtgcgctgaaagtggaacaccctggcacgcaaaatcagcgtttcgattttgccgaattcaacgaccagttcaaacaacagtttggctacgcgctc

SEQ ID NO: 48 - protein, 321 aa, synthetic construct
  REGION 1..321: note = Variant of adenosine kinase
MHHHHHHGGSGMSALICGSLAYDTIMVFPDQFKNHILPDKVHILNVSFLVPRMRREFGGCAGNIAYNLHLLGGAPIPMGTVGQDFGPYREHFETLGIDLSRVKIIDDLFTAQAFITTDHDNNQITAFHPGAMMRSYENHVRDVPGVTLGLVGPDGREGMIQNAEEFAAGGIPFIFDPGQAMPLFNGPELREFIEQADYVVVNDYESNLLQERTGWNEQDIVSRVQAYITTQGPKGALVHTPEKTYDIPPAHERRVVDPTGCGDAFRAGLIYGIQHNYDWLTIGRMGNLMGALKVEHPGTQNQRFDFAEFNDQFKQQFGYAL

SEQ ID NO: 49 - DNA, 963 bp, synthetic construct
  misc_feature 1..963: note = Variant of adenosine kinase
  source 1..963: mol_type = other DNA
atgcaccatcatcaccatcacgggggctccggcatgagtgcactgatttgcggttctttagcgtatgataccatcatggtgtttccggaccagttcaagaaccatattctgcccgataaagttcacatcctcaatgtcagctttcttgtaccacgcatgcgtcgtgaatttggaggctgtgccggcaacattgcgtacaatctgcatctgttgggtggtgctccgatccctatgggaacggtgggccaagatttcggtccgtatcgcgagcacttcgaaactctgggcattgacttatcccgcgtcaagatcatcgatgatctggagacagctcaggccttcattaccaccgaccatgataacaaccagattacggcgtttcatccaggcgcaatgatgcgttcgtacgaaaatcacgttcgtgatgtgccgggtgttaccttgggcctcgtaggtcctgatggacgcgagggcatgatccaaaatgccgaagaatttgctgctggtggcattccgttcatttttgacccaggtcaggcaatgccgctgttcaacggccccgaactgcgcgagtttatcgaacaggcggactatgtggtggtcaacgattacgaaagcaatcttcttcaagaacgtactggctggaacgagcaggacattgtttcacgcgtgcaggcgtatatcaccacgcaaggtcctaaaggagccctggtacatacaccggagaagacctacgatattccgccggcacacgaacgtcgtgtcgttgatccaactggttgcggcgacgcgtttcgcgccggcctgatctatggtattcagcataattatgattggttgaccattggccgcatgggaaacttaatgggtgcgctgaaagtggaacaccctggcacgcaaaatcagcgtttcgattttgccgaattcaacgaccagttcaaacaacagtttggctacgcgctc

SEQ ID NO: 50 - protein, 321 aa, synthetic construct
  REGION 1..321: note = Variant of adenosine kinase
MHHHHHHGGSGMSALICGSLAYDTIMVFPDQFKNHILPDKVHILNVSFLVPRMRREFGGCAGNIAYNLHLLGGAPIPMGTVGQDFGPYREHFETLGIDLSRVKIIDDLETAQAFITTDHDNNQITAFHPGAMMRSYENHVRDVPGVTLGLVGPDGREGMIQNAEEFAAGGIPFIFDPGQAMPLFNGPELREFIEQADYVVVNDYESNLLQERTGWNEQDIVSRVQAYITTQGPKGALVHTPEKTYDIPPAHERRVVDPTGCGDAFRAGLIYGIQHNYDWLTIGRMGNLMGALKVEHPGTQNQRFDFAEFNDQFKQQFGYAL

SEQ ID NO: 51 - DNA, 963 bp, synthetic construct
  misc_feature 1..963: note = Variant of adenosine kinase
  source 1..963: mol_type = other DNA
atgcaccatcatcaccatcacgggggctccggcatgagtgcactgatttgcggttctttagcgtatgataccatcatggtgtttccggaccagttcaagaaccatattctgcccgataaagttcacatcctcaatgtcagctttcttgtaccacgcatgcgtcgtgaatttggaggctgtgccggcaacattgcgtacaatctgcatctgttgggtggtgctccgatccctatgggaacggtgggccaagatttcggtccgtatcgcgagcacttcgaaactctgggcattgacttatcccgcgtcaggatcatcgatgatctgtttacagcgcaggccttcattaccaccgaccatgataacaaccagattacggcgtttcatccaggcgcaatgatgcgttcgtacgaaaatcacgttcgtgatgtgccgggtgttaccttgggcctcgtaggtcctgatggacgcgagggcatgatccaaaatgccgaagaatttgctgctggtggcattccgttcatttttgacccaggtcaggcaatgccgctgttcaacggccccgaactgcgcgagtttatcgaacaggcggactatgtggtggtcaacgattacgaaagcaatcttcttcaagaacgtactggctggaacgagcaggacattgtttcacgcgtgcaggcgtatatcaccacgcaaggtcctaaaggagccctggtacatacaccggagaagacctacgatattccgccggcacacgaacgtcgtgtcgttgatccaactggttgcggcgacgcgtttcgcgccggcctgatctatggtattcagcataattatgattggttgaccattggccgcatgggaaacttaatgggtgcgctgaaagtggaacaccctggcacgcaaaatcagcgtttcgattttgccgaattcaacgaccagttcaaacaacagtttggctacgcgctc

SEQ ID NO: 52 - protein, 321 aa, synthetic construct
  REGION 1..321: note = Variant of adenosine kinase
MHHHHHHGGSGMSALICGSLAYDTIMVFPDQFKNHILPDKVHILNVSFLVPRMRREFGGCAGNIAYNLHLLGGAPIPMGTVGQDFGPYREHFETLGIDLSRVRIIDDLFTAQAFITTDHDNNQITAFHPGAMMRSYENHVRDVPGVTLGLVGPDGREGMIQNAEEFAAGGIPFIFDPGQAMPLFNGPELREFIEQADYVVVNDYESNLLQERTGWNEQDIVSRVQAYITTQGPKGALVHTPEKTYDIPPAHERRVVDPTGCGDAFRAGLIYGIQHNYDWLTIGRMGNLMGALKVEHPGTQNQRFDFAEFNDQFKQQFGYAL

SEQ ID NO: 53 - DNA, 963 bp, synthetic construct
  misc_feature 1..963: note = Variant of adenosine kinase
  source 1..963: mol_type = other DNA
atgcaccatcatcaccatcacgggggctccggcatgagtgcactgatttgcggttctttagcgtatgataccatcatggtgtttccggaccagttcaagaaccatattctgcccgataaagttcacatcctcaatgtcagctttcttgtaccacgcatgcgtcgtgaatttggaggctgtgccggcaacattgcgtacaatctgcatctgttgggtggtgctccgatccctatgggaacggtgggccaagatttcggtccgtatcgcgagcacttcgaaactctgggcattgacttatcccgcgtcaagatcatcgatgatctgctgacagctcaggccttcattaccaccgaccatgataacaaccagattacggcgtttcatccaggcgcaatgatgcgttcgtacgaaaatcacgttcgtgatgtgccgggtgttaccttgggcctcgtaggtcctgatggacgcgagggcatgatccaaaatgccgaagaatttgctgctggtggcattccgttcatttttgacccaggtcaggcaatgccgctgttcaacggccccgaactgcgcgagtttatcgaacaggcggactatgtggtggtcaacgattacgaaagcaatcttcttcaagaacgtactggctggaacgagcaggacattgtttcacgcgtgcaggcgtatatcaccacgcaaggtcctaaaggagccctggtacatacaccggagaagacctacgatattccgccggcacacgaacgtcgtgtcgttgatccaactggttgcggcgacgcgtttcgcgccggcctgatctatggtattcagcataattatgattggttgaccattggccgcatgggaaacttaatgggtgcgctgaaagtggaacaccctggcacgcaaaatcagcgtttcgattttgccgaattcaacgaccagttcaaacaacagtttggctacgcgctc

SEQ ID NO: 54 - protein, 321 aa, synthetic construct
  REGION 1..321: note = Variant of adenosine kinase
MHHHHHHGGSGMSALICGSLAYDTIMVFPDQFKNHILPDKVHILNVSFLVPRMRREFGGCAGNIAYNLHLLGGAPIPMGTVGQDFGPYREHFETLGIDLSRVKIIDDLLTAQAFITTDHDNNQITAFHPGAMMRSYENHVRDVPGVTLGLVGPDGREGMIQNAEEFAAGGIPFIFDPGQAMPLFNGPELREFIEQADYVVVNDYESNLLQERTGWNEQDIVSRVQAYITTQGPKGALVHTPEKTYDIPPAHERRVVDPTGCGDAFRAGLIYGIQHNYDWLTIGRMGNLMGALKVEHPGTQNQRFDFAEFNDQFKQQFGYAL

SEQ ID NO: 55 - DNA, 963 bp, synthetic construct
  misc_feature 1..963: note = Variant of adenosine kinase
  source 1..963: mol_type = other DNA
atgcaccatcatcaccatcacgggggctccggcatgagtgcactgatttgcggttctttagcgtatgataccatcatggtgtttccggaccagttcaagaaccatattctgcccgataaagttcacatcctcaatgtcagctttcttgtaccacgcatgcgtcgtgaatttggaggctgtgccggcaacattgcgtacaatctgcatctgttgggtggtgctccgatccctatgggaacggtgggccaagatttcggtccgtatcgcgagcacttcgaaactctgggcattgacttatcccgcgtcaagcttatcgatgatctgtttacagctcaggccttcattaccaccgaccatgataacaaccagattacggcgtttcatccaggcgcaatgatgcgttcgtacgaaaatcacgttcgtgatgtgccgggtgttaccttgggcctcgtaggtcctgatggacgcgagggcatgatccaaaatgccgaagaatttgctgctggtggcattccgttcatttttgacccaggtcaggcaatgccgctgttcaacggccccgaactgcgcgagtttatcgaacaggcggactatgtggtggtcaacgattacgaaagcaatcttcttcaagaacgtactggctggaacgagcaggacattgtttcacgcgtgcaggcgtatatcaccacgcaaggtcctaaaggagccctggtacatacaccggagaagacctacgatattccgccggcacacgaacgtcgtgtcgttgatccaactggttgcggcgacgcgtttcgcgccggcctgatctatggtattcagcataattatgattggttgaccattggccgcatgggaaacttaatgggtgcgctgaaagtggaacaccctggcacgcaaaatcagcgtttcgattttgccgaattcaacgaccagttcaaacaacagtttggctacgcgctc

SEQ ID NO: 56 - protein, 321 aa, synthetic construct
  REGION 1..321: note = Variant of adenosine kinase
MHHHHHHGGSGMSALICGSLAYDTIMVFPDQFKNHILPDKVHILNVSFLVPRMRREFGGCAGNIAYNLHLLGGAPIPMGTVGQDFGPYREHFETLGIDLSRVKLIDDLFTAQAFITTDHDNNQITAFHPGAMMRSYENHVRDVPGVTLGLVGPDGREGMIQNAEEFAAGGIPFIFDPGQAMPLFNGPELREFIEQADYVVVNDYESNLLQERTGWNEQDIVSRVQAYITTQGPKGALVHTPEKTYDIPPAHERRVVDPTGCGDAFRAGLIYGIQHNYDWLTIGRMGNLMGALKVEHPGTQNQRFDFAEFNDQFKQQFGYAL

SEQ ID NO: 57 - DNA, 963 bp, synthetic construct
  misc_feature 1..963: note = Variant of adenosine kinase
  source 1..963: mol_type = other DNA
atgcaccatcatcaccatcacgggggctccggcatgagtgcactgatttgcggttctttagcgtatgataccatcatggtgtttccggaccagttcaagaaccatattctgcccgataaagttcacatcctcaatgtcagctttcttgtaccacgcatgcgtcgtgaatttggaggctgtgccggcaacattgcgtacaatctgcatctgttgggtggtgctccgatccctatgggaacggtgggccaagatttcggtccgtatcgcgagcacttcgaaactctgggcattgacttatcccgcgtcaagatcatcccggatctgtttacagctcaggccttcattaccaccgaccatgataacaaccagattacggcgtttcatccaggcgcaatgatgcgttcgtacgaaaatcacgttcgtgatgtgccgggtgttaccttgggcctcgtaggtcctgatggacgcgagggcatgatccaaaatgccgaagaatttgctgctggtggcattccgttcatttttgacccaggtcaggcaatgccgctgttcaacggccccgaactgcgcgagtttatcgaacaggcggactatgtggtggtcaacgattacgaaagcaatcttcttcaagaacgtactggctggaacgagcaggacattgtttcacgcgtgcaggcgtatatcaccacgcaaggtcctaaaggagccctggtacatacaccggagaagacctacgatattccgccggcacacgaacgtcgtgtcgttgatccaactggttgcggcgacgcgtttcgcgccggcctgatctatggtattcagcataattatgattggttgaccattggccgcatgggaaacttaatgggtgcgctgaaagtggaacaccctggcacgcaaaatcagcgtttcgattttgccgaattcaacgaccagttcaaacaacagtttggctacgcgctc

SEQ ID NO: 58 - protein, 321 aa, synthetic construct
  REGION 1..321: note = Variant of adenosine kinase
MHHHHHHGGSGMSALICGSLAYDTIMVFPDQFKNHILPDKVHILNVSFLVPRMRREFGGCAGNIAYNLHLLGGAPIPMGTVGQDFGPYREHFETLGIDLSRVKIIPDLFTAQAFITTDHDNNQITAFHPGAMMRSYENHVRDVPGVTLGLVGPDGREGMIQNAEEFAAGGIPFIFDPGQAMPLFNGPELREFIEQADYVVVNDYESNLLQERTGWNEQDIVSRVQAYITTQGPKGALVHTPEKTYDIPPAHERRVVDPTGCGDAFRAGLIYGIQHNYDWLTIGRMGNLMGALKVEHPGTQNQRFDFAEFNDQFKQQFGYAL

SEQ ID NO: 59 - DNA, 963 bp, synthetic construct
  misc_feature 1..963: note = Variant of adenosine kinase
  source 1..963: mol_type = other DNA
atgcaccatcatcaccatcacgggggctccggcatgagtgcactgatttgcggttctttagcgtatgataccatcatggtgtttccggaccagttcaagaaccatattctgcccgataaagttcacatcctcaatgtcagctttcttgtaccacgcatgcgtcgtgaatttggaggctgtgccggcaacattgcgtacaatctgcatctgttgggtggtgctccgatccctatgggaacggtgggccaagatttcggtccgtatcgcgagcacttcgaaactctgggcattgacttatcccgcgtcaagatcatcgatgatctgtttacaccgcaggccttcattaccaccgaccatgataacaaccagattacggcgtttcatccaggcgcaatgatgcgttcgtacgaaaatcacgttcgtgatgtgccgggtgttaccttgggcctcgtaggtcctgatggacgcgagggcatgatccaaaatgccgaagaatttgctgctggtggcattccgttcatttttgacccaggtcaggcaatgccgctgttcaacggccccgaactgcgcgagtttatcgaacaggcggactatgtggtggtcaacgattacgaaagcaatcttcttcaagaacgtactggctggaacgagcaggacattgtttcacgcgtgcaggcgtatatcaccacgcaaggtcctaaaggagccctggtacatacaccggagaagacctacgatattccgccggcacacgaacgtcgtgtcgttgatccaactggttgcggcgacgcgtttcgcgccggcctgatctatggtattcagcataattatgattggttgaccattggccgcatgggaaacttaatgggtgcgctgaaagtggaacaccctggcacgcaaaatcagcgtttcgattttgccgaattcaacgaccagttcaaacaagagtttggctacgcgctc

SEQ ID NO: 60 - protein, 321 aa, synthetic construct
  REGION 1..321: note = Variant of adenosine kinase
MHHHHHHGGSGMSALICGSLAYDTIMVFPDQFKNHILPDKVHILNVSFLVPRMRREFGGCAGNIAYNLHLLGGAPIPMGTVGQDFGPYREHFETLGIDLSRVKIIDDLFTPQAFITTDHDNNQITAFHPGAMMRSYENHVRDVPGVTLGLVGPDGREGMIQNAEEFAAGGIPFIFDPGQAMPLFNGPELREFIEQADYVVVNDYESNLLQERTGWNEQDIVSRVQAYITTQGPKGALVHTPEKTYDIPPAHERRVVDPTGCGDAFRAGLIYGIQHNYDWLTIGRMGNLMGALKVEHPGTQNQRFDFAEFNDQFKQEFGYAL

SEQ ID NO: 61 - DNA, 963 bp, synthetic construct
  misc_feature 1..963: note = Variant of adenosine kinase
  source 1..963: mol_type = other DNA
atgcaccatcatcaccatcacgggggctccggcatgagtgcactgatttgcggttctttagcgtatgataccatcatggtgtttccggaccagttcaagaaccatattctgcccgataaagttcaccggctcaatgtcagctttctggtaccacgcatgcgtcgtgaatttggaggctgtgccggcaacattgcgtacaatctgcatctgttgggtggtgctccgatccctatgggaacggtgggccaagatttcggtccgtatcgcgagcacttcgaaactctgggcattgacttatcccgcgtcaagatcatcgatgatctgtttacaccgcaggccttcattaccaccgaccatgataacaaccagattacggcgtttcatccaggcgcaatgatgcgttcgtacgaaaatcacgttcgtgatgtgccgggtgttaccttgggcctcgtaggtcctgatggacgcgagggcatgatccaaaatgccgaagaatttgctgctggtggcattccgttcatttttgacccaggtcaggcaatgccgctgttcaacggccccgaactgcgcgagtttatcgaacaggcggactatgtggtggtcaacgattacgaaagcaatcttcttcaagaacgtactggctggaacgagcaggacattgtttcacgcgtgcaggcgtatatcaccacgcaaggtcctaaaggagccctggtacatacaccggagaagacctacgatattccgccggcacacgaacgtcgtgtcgttgatccaactggttgcggcgacgcgtttcgcgccggcctgatctatggtattcagcataattatgattggttgaccattggccgcatgggaaacttaatgggtgcgctgaaagtggaacaccctggcacgcaaaatcagcgtttcgattttgccgaattcaacgaccagttcaaacaacagtttggctacgcgctc

SEQ ID NO: 62 - protein, 321 aa, synthetic construct
  REGION 1..321: note = Variant of adenosine kinase
MHHHHHHGGSGMSALICGSLAYDTIMVFPDQFKNHILPDKVHRLNVSFLVPRMRREFGGCAGNIAYNLHLLGGAPIPMGTVGQDFGPYREHFETLGIDLSRVKIIDDLFTPQAFITTDHDNNQITAFHPGAMMRSYENHVRDVPGVTLGLVGPDGREGMIQNAEEFAAGGIPFIFDPGQAMPLFNGPELREFIEQADYVVVNDYESNLLQERTGWNEQDIVSRVQAYITTQGPKGALVHTPEKTYDIPPAHERRVVDPTGCGDAFRAGLIYGIQHNYDWLTIGRMGNLMGALKVEHPGTQNQRFDFAEFNDQFKQQFGYAL

SEQ ID NO: 63 - DNA, 963 bp, synthetic construct
  misc_feature 1..963: note = Variant of adenosine kinase
  source 1..963: mol_type = other DNA
atgcaccatcatcaccatcacgggggctccggcatgagtgcactgatttgcggttctttagcgtatgataccatcatggtgtttccggaccagttcaagaaccatattctgcccgataaagttcacatcctcaatgtcagctttcttgtaccacgcatgcgtcgtgaatttggaggctgtgccggcaacattgcgtacaatctgcatctgttgggtggtgctccgatccctatgggaacggtgggccaagatttcggtccgtatcgcgagcacttcgaaactctgggcattgacttatcccgcgtcctgatcatcgatgatctgtttacagcgcaggccttcattaccaccgaccatgataacaaccagattacggcgtttcatccaggcgcaatgatgcgttcgtacgaaaatcacgttcgtgatgtgccgggtgttaccttgggcctcgtaggtcctgatggacgcgagggcatgatccaaaatgccgaagaatttgctgctggtggcattccgttcatttttgacccaggtcaggcaatgccgctgttcaacggccccgaactgcgcgagtttatcgaacaggcggactatgtggtggtcaacgattacgaaagcaatcttcttcaagaacgtactggctggaacgagcaggacattgtttcacgcgtgcaggcgtatatcaccacgcaaggtcctaaaggagccctggtacatacaccggagaagacctacgatattccgccggcacacgaacgtcgtgtcgttgatccaactggttgcggcgacgcgtttcgcgccggcctgatctatggtattcagcataattatgattggttgaccattggccgcatgggaaacttaatgggtgcgctgaaagtggaacaccctggcacgcaaaatcagcgtttcgattttgccgaattcaacgaccagttcaaacaacagtttggctacgcgctc

SEQ ID NO: 64 - protein, 321 aa, synthetic construct
  REGION 1..321: note = Variant of adenosine kinase
MHHHHHHGGSGMSALICGSLAYDTIMVFPDQFKNHILPDKVHILNVSFLVPRMRREFGGCAGNIAYNLHLLGGAPIPMGTVGQDFGPYREHFETLGIDLSRVLIIDDLFTAQAFITTDHDNNQITAFHPGAMMRSYENHVRDVPGVTLGLVGPDGREGMIQNAEEFAAGGIPFIFDPGQAMPLFNGPELREFIEQADYVVVNDYESNLLQERTGWNEQDIVSRVQAYITTQGPKGALVHTPEKTYDIPPAHERRVVDPTGCGDAFRAGLIYGIQHNYDWLTIGRMGNLMGALKVEHPGTQNQRFDFAEFNDQFKQQFGYAL

SEQ ID NO: 65 - DNA, 963 bp, synthetic construct
  misc_feature 1..963: note = Variant of adenosine kinase
  source 1..963: mol_type = other DNA
atgcaccatcatcaccatcacgggggctccggcatgagtgcactgatttgcggttctttagcgtatgataccatcatggtgtttccggaccagttcaagaaccatattctgcccgataaagttcacatcctcaatgtcagctttcttgtaccacgcatgcgtcgtgaatttggaggctgtgccggcaacattgcgtacaatctgcatctgttgggtggtgctccgatccctatgggaacggtgggccaagatttcggtccgtatcgcgagcacttcgaaactctgggcattgacttatcccgcgtcaagatcatcgatgatctgtttacaccgcaggccttcattaccaccgaccatgataacaaccagattacggcgtttcatccaggcgcaatgatgcgttcgtacgaaaatcacgttcgtgatgtgccgggtgttaccttgggcctcgtaggtcctgatggacgcgagggcatgatccaaaatgccgaagaatttgctgctggtggcattccgttcatttttgacccaggtcaggcaatgccgctgttcaacggccccgaactgcgcgagtttatcgaacaggcggactatgtggtggtcaacgattacgaaagcaatcttcttcaagaacgtactggctggaacgagcaggacattgtttcacgcgtgcaggcgtatatcaccacgcaaggtcctaaaggagccctggtacatacaccggagaagacctacgatattccgccggcacacgaacgtcgtgtcgttgatccaactggttgcggcgacgcgtttcgcgccggcctgatctatggtattcagcataattatgattggttgaccattggccgcatgggaaacttaatgggtgcgctgaaagtggaacaccctggcacgcaaaatcagcgtttcgattttgccgaattcaacgaccagttcaaacaatcttttggctacgcgctc

SEQ ID NO: 66 - protein, 321 aa, synthetic construct
  REGION 1..321: note = Variant of adenosine kinase
MHHHHHHGGSGMSALICGSLAYDTIMVFPDQFKNHILPDKVHILNVSFLVPRMRREFGGCAGNIAYNLHLLGGAPIPMGTVGQDFGPYREHFETLGIDLSRVKIIDDLFTPQAFITTDHDNNQITAFHPGAMMRSYENHVRDVPGVTLGLVGPDGREGMIQNAEEFAAGGIPFIFDPGQAMPLFNGPELREFIEQADYVVVNDYESNLLQERTGWNEQDIVSRVQAYITTQGPKGALVHTPEKTYDIPPAHERRVVDPTGCGDAFRAGLIYGIQHNYDWLTIGRMGNLMGALKVEHPGTQNQRFDFAEFNDQFKQSFGYAL

SEQ ID NO: 67 - DNA, 963 bp, synthetic construct
  misc_feature 1..963: note = Variant of adenosine kinase
  source 1..963: mol_type = other DNA
atgcaccatcatcaccatcacgggggctccggcatgagtgcactgatttgcggttctttagcgtatgataccatcatggtgtttccggaccagttcaagaaccatattctgcccgataaagttcacatcctcaatgtcagctttcttgtaccacgcatgcgtcgtgaatttggaggctgtgccggcaacattgcgtacaatctgcatctgttgggtggtgctccgatccctatgggaacggtgggccaagatttcggtccgtatcgcgagcacttcgaaactctgggcattgacttatcccgcgtcaagatcatcgatgatctgtttacaccgcaggccttcattaccaccgaccatgataacaaccagattacggcgtttcatccaggcgcaatgatgcgttcgtacgaaaatcacgttcgtgatgtgccgggtgttaccttgggcctcgtaggtcctgatggacgcgagggcatgatccaaaatgccgaagaatttgctgctggtggcattccgttcatttttgacccaggtcaggcaatgccgctgttcaacggccccgaactgcgcgagtttatcgaacaggcggactatgtggtggtcaacgattacgaaagcaatcttcttcaagaacgtactggctggaacgagcaggacattgtttcacgcgtgcaggcgtatatcaccacgcaaggtcctaaaggagccctggtacatacaccggagaagacctacgatattccgccggcacacgaacgtccggtcgttgatccaactggttgcggcgacgcgtttcgcgccggcctgatctatggtattcagcataattatgattggttgaccattggccgcatgggaaacttaatgggtgcgctgaaagtggaacaccctggcacgcaaaatcagcgtttcgattttgccgaattcaacgaccagttcaaacaacagtttggctacgcgctc

SEQ ID NO: 68 - protein, 321 aa, synthetic construct
  REGION 1..321: note = Variant of adenosine kinase
MHHHHHHGGSGMSALICGSLAYDTIMVFPDQFKNHILPDKVHILNVSFLVPRMRREFGGCAGNIAYNLHLLGGAPIPMGTVGQDFGPYREHFETLGIDLSRVKIIDDLFTPQAFITTDHDNNQITAFHPGAMMRSYENHVRDVPGVTLGLVGPDGREGMIQNAEEFAAGGIPFIFDPGQAMPLFNGPELREFIEQADYVVVNDYESNLLQERTGWNEQDIVSRVQAYITTQGPKGALVHTPEKTYDIPPAHERPVVDPTGCGDAFRAGLIYGIQHNYDWLTIGRMGNLMGALKVEHPGTQNQRFDFAEFNDQFKQQFGYAL

SEQ ID NO: 69 - DNA, 963 bp, synthetic construct
  misc_feature 1..963: note = Variant of adenosine kinase
  source 1..963: mol_type = other DNA
atgcaccatcatcaccatcacgggggctccggcatgagtgcactgatttgcggttctttagcgtatgataccatcatggtgtttccggaccagttcaagaaccatattctgcccgataaagttcacatcctcaatgtcagctttcttgtaccacgcatgcgtcgtgaatttggaggctgtgccggcaacattgcgtacaatctgcatctgttgggtggtgctccgatccctatgggaacggtgggccaagatttcggtccgtatcgcgagcacttcgaaactctgggcattgacttatcccgcgtcaagatcatcgatgatctgtttacaccgcaggccttcattaccaccgaccatgataacaaccagattacggcgtttcatccaggcgcaatgatgcgttcgtacgaaaatcacgttcgtgatgtgccgggtgttaccttgggcctcgtaggtcctgatggacgcgagggcatgatccaaaatgccgaagaatttgctgctggtggcattccgttcatttttgacccaggtcaggcaatgccgctgttcaacggccccgaactgcgcgagtttatcgaacaggcggactatgtggtggtcaacgattacgaaagcaatcttcttcaagaacgtactggctggaacgagcaggacattgtttcacgcgtgcaggcgtatatcaccacgcaaggttcgaaaggagccctggtacatacaccggagaagacctacgatattccgccggcacacgaacgtcgtgtcgttgatccaactggttgcggcgacgcgtttcgcgccggcctgatctatggtattcagcataattatgattggttgaccattggccgcatgggaaacttaatgggtgcgctgaaagtggaacaccctggcacgcaaaatcagcgtttcgattttgccgaattcaacgaccagttcaaacaacagtttggctacgcgctc

SEQ ID NO: 70 - protein, 321 aa, synthetic construct
  REGION 1..321: note = Variant of adenosine kinase
MHHHHHHGGSGMSALICGSLAYDTIMVFPDQFKNHILPDKVHILNVSFLVPRMRREFGGCAGNIAYNLHLLGGAPIPMGTVGQDFGPYREHFETLGIDLSRVKIIDDLFTPQAFITTDHDNNQITAFHPGAMMRSYENHVRDVPGVTLGLVGPDGREGMIQNAEEFAAGGIPFIFDPGQAMPLFNGPELREFIEQADYVVVNDYESNLLQERTGWNEQDIVSRVQAYITTQGSKGALVHTPEKTYDIPPAHERRVVDPTGCGDAFRAGLIYGIQHNYDWLTIGRMGNLMGALKVEHPGTQNQRFDFAEFNDQFKQQFGYAL

SEQ ID NO: 71 - DNA, 963 bp, synthetic construct
  misc_feature 1..963: note = Variant of adenosine kinase
  source 1..963: mol_type = other DNA
atgcaccatcatcaccatcacgggggctccggcatgagtgcactgatttgcggttctttagcgtatgataccatcatggtgtttccggaccagttcaagaaccatattctgcccgataaagttcacatcctcaatgtcagctttcttgtaccacgcatgcgtcgtgaatttggaggctgtgccggcaacattgcgtacaatctgcatctgttgggtggtgctccgatccctatgggaacggtgggccaagatttcggtccgtatcgcgagcacttcgaaactctgggcattgacttatcccgcgtcaagatcatcgatgatctgtttacaccgcaggccttcattaccaccgaccatgataacaaccagattacggcgtttcatccagcggcaatgatgcgttcgtacgaaaatcacgttcgtgatgtgccgggtgttaccttgggcctcgtaggtcctgatggacgcgagggcatgatccaaaatgccgaagaatttgctgctggtggcattccgttcatttttgacccaggtcaggcaatgccgctgttcaacggccccgaactgcgcgagtttatcgaacaggcggactatgtggtggtcaacgattacgaaagcaatcttcttcaagaacgtactggctggaacgagcaggacattgtttcacgcgtgcaggcgtatatcaccacgcaaggtcctaaaggagccctggtacatacaccggagaagacctacgatattccgccggcacacgaacgtcgtgtcgttgatccaactggttgcggcgacgcgtttcgcgccggcctgatctatggtattcagcataattatgattggttgaccattggccgcatgggaaacttaatgggtgcgctgaaagtggaacaccctggcacgcaaaatcagcgtttcgattttgccgaattcaacgaccagttcaaacaacagtttggctacgcgctc

SEQ ID NO: 72 - protein, 321 aa, synthetic construct
  REGION 1..321: note = Variant of adenosine kinase
MHHHHHHGGSGMSALICGSLAYDTIMVFPDQFKNHILPDKVHILNVSFLVPRMRREFGGCAGNIAYNLHLLGGAPIPMGTVGQDFGPYREHFETLGIDLSRVKIIDDLFTPQAFITTDHDNNQITAFHPAAMMRSYENHVRDVPGVTLGLVGPDGREGMIQNAEEFAAGGIPFIFDPGQAMPLFNGPELREFIEQADYVVVNDYESNLLQERTGWNEQDIVSRVQAYITTQGPKGALVHTPEKTYDIPPAHERRVVDPTGCGDAFRAGLIYGIQHNYDWLTIGRMGNLMGALKVEHPGTQNQRFDFAEFNDQFKQQFGYAL

SEQ ID NO: 73 - DNA, 963 bp, synthetic construct
  misc_feature 1..963: note = Variant of adenosine kinase
  source 1..963: mol_type = other DNA
atgcaccatcatcaccatcacgggggctccggcatgagtgcactgatttgcggttctttagcgtatgataccatcatggtgtttccggaccagttcaagaaccatattctgcccgataaagttcacatcctcaatgtcagctttcttgtaccacgcatgcgtcgtgaatttggaggctgtgccggcaacattgcgtacaatctgcatctgttgggtggtgctccgatccctatgggaacggtgggccaagatttcggtccgtatcgcgagcacttcgaaactctgggcattgacttatcccgcgtcaagatcatcgatgatctgtttacaccgcaggccttcattaccaccgaccatgataacaaccagattacggcgtttcatccaggcgcaatgatgcgttcgtacgaaaatcacgttcgtgatgtgccgggtgttaccttgggcctcgtaggtcctgatggacgcgagggcatgatccaaaatgccgaagaatttgctgctggtggcattccgttcatttttgacccaggtcaggcaatgccgctgttcaacggccccgaactgcgcgagtttatcgaacaggcggactatgtggtggtcaacgattacgaaagcaatcttcttcaagaacgtactggctggaacgagcaggacattgtttcacgcgtgcaggcgtatatcaccacgcaaggtcctaaaggagccctggtacatacaccggagaagacctacgatattccgccggcacacgaacgtcgtgtcgttgatccaactggttgcggcgacgcgtttcgcgccggcctgatctatggtattcagcataattatgattggttgaccattggccgcatgggaaacttaatgggtgcgctgaaagtggaacaccctggcacgcaaaatcagcgtttcgattttgccgaattcaacgaccagttcaaacaagattttggctacgcgctc

SEQ ID NO: 74 - protein, 321 aa, synthetic construct
  REGION 1..321: note = Variant of adenosine kinase
MHHHHHHGGSGMSALICGSLAYDTIMVFPDQFKNHILPDKVHILNVSFLVPRMRREFGGCAGNIAYNLHLLGGAPIPMGTVGQDFGPYREHFETLGIDLSRVKIIDDLFTPQAFITTDHDNNQITAFHPGAMMRSYENHVRDVPGVTLGLVGPDGREGMIQNAEEFAAGGIPFIFDPGQAMPLFNGPELREFIEQADYVVVNDYESNLLQERTGWNEQDIVSRVQAYITTQGPKGALVHTPEKTYDIPPAHERRVVDPTGCGDAFRAGLIYGIQHNYDWLTIGRMGNLMGALKVEHPGTQNQRFDFAEFNDQFKQDFGYAL

SEQ ID NO: 75 - DNA, 963 bp, synthetic construct
  misc_feature 1..963: note = Variant of adenosine kinase
  source 1..963: mol_type = other DNA
atgcaccatcatcaccatcacgggggctccggcatgagtgcactgatttgcggttctttagcgtatgataccatcatggtgtttccggaccagttcaagaaccatattctgcccgataaagttcacatcctcaatgtcagctttcttgtaccacgcatgcgtcgtgaatttggaggctgtgccggcaacattgcgtacaatctgcatctgttgggtggtgctccgatccctatgggaacggtgggccaagatttcggtccgtatcgcgagcacttcgaaactctgggcattgacttatcccgcgtcaagatcatcgatgatctgtttacaccgcaggccttcattaccaccgaccatgataacaaccagattacggcgtttcatccaggcgcaatgatgcgttcgtacgaaaatcacgttcgtgatgtgccgggtgttaccttgggcctcgtaggtcctgatggacgcgagggcatgatccaaaatgccgaagaatttgctgctggtggcattccgttcatttttgacccaggtcaggcaatgccgctgttcaacggccccgaactgcgcgagtttatcgaacaggcggactatgtggtggtcaacgattacgaaagcaatcttcttcaagaacgtactggctggaacgagcaggacattgtttcacgcgtgcaggcgtatatcaccacgcaaggtcctaaaggagccctggtacatacaccggagaagacctacgatattccgggggcacacgaacgtcgtgtcgttgatccaactggttgcggcgacgcgtttcgcgccggcctgatctatggtattcagcataattatgattggttgaccattggccgcatgggaaacttaatgggtgcgctgaaagtggaacaccctggcacgcaaaatcagcgtttcgattttgccgaattcaacgaccagttcaaacaacagtttggctacgcgctc

SEQ ID NO: 76 - protein, 321 aa, synthetic construct
  REGION 1..321: note = Variant of adenosine kinase
MHHHHHHGGSGMSALICGSLAYDTIMVFPDQFKNHILPDKVHILNVSFLVPRMRREFGGCAGNIAYNLHLLGGAPIPMGTVGQDFGPYREHFETLGIDLSRVKIIDDLFTPQAFITTDHDNNQITAFHPGAMMRSYENHVRDVPGVTLGLVGPDGREGMIQNAEEFAAGGIPFIFDPGQAMPLFNGPELREFIEQADYVVVNDYESNLLQERTGWNEQDIVSRVQAYITTQGPKGALVHTPEKTYDIPGAHERRVVDPTGCGDAFRAGLIYGIQHNYDWLTIGRMGNLMGALKVEHPGTQNQRFDFAEFNDQFKQQFGYAL

SEQ ID NO: 77 - DNA, 963 bp, synthetic construct
  misc_feature 1..963: note = Variant of adenosine kinase
  source 1..963: mol_type = other DNA
atgcaccatcatcaccatcacgggggctccggcatgagtgcactgatttgcggttctttagcgtatgataccatcatggtgtttccggaccagttcaagaaccatattctgcccgataaagttcacatcctcaatgtcagctttcttgtaccacgcatgcgtcgtgaatttggaggctgtgccggcaacattgcgtacaatctgcatctgttgggtggtgctccgatccctatgggaacggtgggccaagatttcggtccgtatcgcgagcacttcgaaactctgggcattgacttatcccgcgtcaagcctatcgatgatctgtttacagctcaggccttcattaccaccgaccatgataacaaccagattacggcgtttcatccaggcgcaatgatgcgttcgtacgaaaatcacgttcgtgatgtgccgggtgttaccttgggcctcgtaggtcctgatggacgcgagggcatgatccaaaatgccgaagaatttgctgctggtggcattccgttcatttttgacccaggtcaggcaatgccgctgttcaacggccccgaactgcgcgagtttatcgaacaggcggactatgtggtggtcaacgattacgaaagcaatcttcttcaagaacgtactggctggaacgagcaggacattgtttcacgcgtgcaggcgtatatcaccacgcaaggtcctaaaggagccctggtacatacaccggagaagacctacgatattccgccggcacacgaacgtcgtgtcgttgatccaactggttgcggcgacgcgtttcgcgccggcctgatctatggtattcagcataattatgattggttgaccattggccgcatgggaaacttaatgggtgcgctgaaagtggaacaccctggcacgcaaaatcagcgtttcgattttgccgaattcaacgaccagttcaaacaacagtttggctacgcgctc

SEQ ID NO: 78 - protein, 321 aa, synthetic construct
  REGION 1..321: note = Variant of adenosine kinase
MHHHHHHGGSGMSALICGSLAYDTIMVFPDQFKNHILPDKVHILNVSFLVPRMRREFGGCAGNIAYNLHLLGGAPIPMGTVGQDFGPYREHFETLGIDLSRVKPIDDLFTAQAFITTDHDNNQITAFHPGAMMRSYENHVRDVPGVTLGLVGPDGREGMIQNAEEFAAGGIPFIFDPGQAMPLFNGPELREFIEQADYVVVNDYESNLLQERTGWNEQDIVSRVQAYITTQGPKGALVHTPEKTYDIPPAHERRVVDPTGCGDAFRAGLIYGIQHNYDWLTIGRMGNLMGALKVEHPGTQNQRFDFAEFNDQFKQQFGYAL

SEQ ID NO: 79 - DNA, 963 bp, synthetic construct
  misc_feature 1..963: note = Variant of adenosine kinase
  source 1..963: mol_type = other DNA
atgcaccatcatcaccatcacgggggctccggcatgagtgcactgatttgcggttctttagcgtatgataccatcatggtgtttccggaccagttcaagaaccatattctgcccgataaagttcacatcctcaatgtcagctttcttgtaccacgcatgcgtcgtgaatttggaggctgtgccggcaacattgcgtacaatctgcatctgttgggtggtgctccgatccctatgggaacggtgggccaagatttcggtccgtatcgcgagcacttcgaaactctgggcattgacttatcccgcgtcaagtggatcgatgatctgtttacagctcaggccttcattaccaccgaccatgataacaaccagattacggcgtttcatccaggcgcaatgatgcgttcgtacgaaaatcacgttcgtgatgtgccgggtgttaccttgggcctcgtaggtcctgatggacgcgagggcatgatccaaaatgccgaagaatttgctgctggtggcattccgttcatttttgacccaggtcaggcaatgccgctgttcaacggccccgaactgcgcgagtttatcgaacaggcggactatgtggtggtcaacgattacgaaagcaatcttcttcaagaacgtactggctggaacgagcaggacattgtttcacgcgtgcaggcgtatatcaccacgcaaggtcctaaaggagccctggtacatacaccggagaagacctacgatattccgccggcacacgaacgtcgtgtcgttgatccaactggttgcggcgacgcgtttcgcgccggcctgatctatggtattcagcataattatgattggttgaccattggccgcatgggaaacttaatgggtgcgctgaaagtggaacaccctggcacgcaaaatcagcgtttcgattttgccgaattcaacgaccagttcaaacaacagtttggctacgcgctc

SEQ ID NO: 80 - protein, 321 aa, synthetic construct
  REGION 1..321: note = Variant of adenosine kinase
MHHHHHHGGSGMSALICGSLAYDTIMVFPDQFKNHILPDKVHILNVSFLVPRMRREFGGCAGNIAYNLHLLGGAPIPMGTVGQDFGPYREHFETLGIDLSRVKWIDDLFTAQAFITTDHDNNQITAFHPGAMMRSYENHVRDVPGVTLGLVGPDGREGMIQNAEEFAAGGIPFIFDPGQAMPLFNGPELREFIEQADYVVVNDYESNLLQERTGWNEQDIVSRVQAYITTQGPKGALVHTPEKTYDIPPAHERRVVDPTGCGDAFRAGLIYGIQHNYDWLTIGRMGNLMGALKVEHPGTQNQRFDFAEFNDQFKQQFGYAL

SEQ ID NO: 81 - DNA, 963 bp, synthetic construct
  misc_feature 1..963: note = Variant of adenosine kinase
  source 1..963: mol_type = other DNA
atgcaccatcatcaccatcacgggggctccggcatgagtgcactgatttgcggttctttagcgtatgataccatcatggtgtttccggaccagttcaagaaccatattctgcccgataaagttcacatcctcaatgtcagctttcttgtaccacgcatgcgtcgtgaatttggaggctgtgccggcaacattgcgtacaatctgcatctgttgggtggtgctccgatccctatgggaacggtgggccaagatttcggtccgtatcgcgagcacttcgaaactctgggcattgacttatcccgcgtcaagatcatcgatgatctgtttacaccgcaggccttcattaccaccgaccatgataacaaccagattacggcgtttcatccaggcgcaatgatgcgttcgtacgaaaatcacgttcgtgatgtgccgggtgttaccttgggcctcgtaggtcctgatggacgcgagggcatgatccaaaatgccgaagaatttgctgctggtggcattccgttcatttttgacccaggtcaggcaatgccgctgttcaacggccccgaactgcgcgagtttatcgaacaggcggactatgtggtggtcaacgattacgaaagcaatcttcttcaagaacgtactggctggaacgagcaggacattgtttcacgcgtgcaggcgtatatcaccacgcaaggtcctaaaggagccctggtacatacaccggagaagacctacgatattccgtcggcacacgaacgtcgtgtcgttgatccaactggttgcggcgacgcgtttcgcgccggcctgatctatggtattcagcataattatgattggttgaccattggccgcatgggaaacttaatgggtgcgctgaaagtggaacaccctggcacgcaaaatcagcgtttcgattttgccgaattcaacgaccagttcaaacaacagtttggctacgcgctc

SEQ ID NO: 82 - protein, 321 aa, synthetic construct
  REGION 1..321: note = Variant of adenosine kinase
MHHHHHHGGSGMSALICGSLAYDTIMVFPDQFKNHILPDKVHILNVSFLVPRMRREFGGCAGNIAYNLHLLGGAPIPMGTVGQDFGPYREHFETLGIDLSRVKIIDDLFTPQAFITTDHDNNQITAFHPGAMMRSYENHVRDVPGVTLGLVGPDGREGMIQNAEEFAAGGIPFIFDPGQAMPLFNGPELREFIEQADYVVVNDYESNLLQERTGWNEQDIVSRVQAYITTQGPKGALVHTPEKTYDIPSAHERRVVDPTGCGDAFRAGLIYGIQHNYDWLTIGRMGNLMGALKVEHPGTQNQRFDFAEFNDQFKQQFGYAL

SEQ ID NO: 83 - DNA, 963 bp, synthetic construct
  misc_feature 1..963: note = Variant of adenosine kinase
  source 1..963: mol_type = other DNA
atgcaccatcatcaccatcacgggggctccggcatgagtgcactgatttgcggttctttagcgtatgataccatcatggtgtttccggaccagttcaagaaccatattctgcccgataaagttcacatcctcaatgtcagctttcttgtaccacgcatgcgtcgtgaatttggaggctgtgccggcaacattgcgtacaatctgcatctgttgggtggtgctccgatccctatgggaacggtgggccaagatttcggtccgtatcgcgagcacttcgaaactctgggcattgacttatcccgcgtcaagatcatcgatacgctgtttacagctcaggccttcattaccaccgaccatgataacaaccagattacggcgtttcatccaggcgcaatgatgcgttcgtacgaaaatcacgttcgtgatgtgccgggtgttaccttgggcctcgtaggtcctgatggacgcgagggcatgatccaaaatgccgaagaatttgctgctggtggcattccgttcatttttgacccaggtcaggcaatgccgctgttcaacggccccgaactgcgcgagtttatcgaacaggcggactatgtggtggtcaacgattacgaaagcaatcttcttcaagaacgtactggctggaacgagcaggacattgtttcacgcgtgcaggcgtatatcaccacgcaaggtcctaaaggagccctggtacatacaccggagaagacctacgatattccgccggcacacgaacgtcgtgtcgttgatccaactggttgcggcgacgcgtttcgcgccggcctgatctatggtattcagcataattatgattggttgaccattggccgcatgggaaacttaatgggtgcgctgaaagtggaacaccctggcacgcaaaatcagcgtttcgattttgccgaattcaacgaccagttcaaacaacagtttggctacgcgctc

SEQ ID NO: 84 - protein, 321 aa, synthetic construct
  REGION 1..321: note = Variant of adenosine kinase
MHHHHHHGGSGMSALICGSLAYDTIMVFPDQFKNHILPDKVHILNVSFLVPRMRREFGGCAGNIAYNLHLLGGAPIPMGTVGQDFGPYREHFETLGIDLSRVKIIDTLFTAQAFITTDHDNNQITAFHPGAMMRSYENHVRDVPGVTLGLVGPDGREGMIQNAEEFAAGGIPFIFDPGQAMPLFNGPELREFIEQADYVVVNDYESNLLQERTGWNEQDIVSRVQAYITTQGPKGALVHTPEKTYDIPPAHERRVVDPTGCGDAFRAGLIYGIQHNYDWLTIGRMGNLMGALKVEHPGTQNQRFDFAEFNDQFKQQFGYAL

SEQ ID NO: 85 - DNA, 963 bp, synthetic construct
  misc_feature 1..963: note = Variant of adenosine kinase
  source 1..963: mol_type = other DNA
atgcaccatcatcaccatcacgggggctccggcatgagtgcactgatttgcggttctttagcgtatgataccatcatggtgtttccggaccagttcaagaaccatattctgcccgataaagttcacatcctcaatgtcagctttcttgtaccacgcatgcgtcgtgaatttggaggctgtgccggcaacattgcgtacaatctgcatctgttgggtggtgctccgatccctatgggaacggtgggccaagatttcggtccgtatcgcgagcacttcgaaactctgggcattgacttatcccgcgtcaagatcatcggggatctgtttacagctcaggccttcattaccaccgaccatgataacaaccagattacggcgtttcatccaggcgcaatgatgcgttcgtacgaaaatcacgttcgtgatgtgccgggtgttaccttgggcctcgtaggtcctgatggacgcgagggcatgatccaaaatgccgaagaatttgctgctggtggcattccgttcatttttgacccaggtcaggcaatgccgctgttcaacggccccgaactgcgcgagtttatcgaacaggcggactatgtggtggtcaacgattacgaaagcaatcttcttcaagaacgtactggctggaacgagcaggacattgtttcacgcgtgcaggcgtatatcaccacgcaaggtcctaaaggagccctggtacatacaccggagaagacctacgatattccgccggcacacgaacgtcgtgtcgttgatccaactggttgcggcgacgcgtttcgcgccggcctgatctatggtattcagcataattatgattggttgaccattggccgcatgggaaacttaatgggtgcgctgaaagtggaacaccctggcacgcaaaatcagcgtttcgattttgccgaattcaacgaccagttcaaacaacagtttggctacgcgctc

SEQ ID NO: 86 - protein, 321 aa, synthetic construct
  REGION 1..321: note = Variant of adenosine kinase
MHHHHHHGGSGMSALICGSLAYDTIMVFPDQFKNHILPDKVHILNVSFLVPRMRREFGGCAGNIAYNLHLLGGAPIPMGTVGQDFGPYREHFETLGIDLSRVKIIGDLFTAQAFITTDHDNNQITAFHPGAMMRSYENHVRDVPGVTLGLVGPDGREGMIQNAEEFAAGGIPFIFDPGQAMPLFNGPELREFIEQADYVVVNDYESNLLQERTGWNEQDIVSRVQAYITTQGPKGALVHTPEKTYDIPPAHERRVVDPTGCGDAFRAGLIYGIQHNYDWLTIGRMGNLMGALKVEHPGTQNQRFDFAEFNDQFKQQFGYAL

SEQ ID NO: 87 - DNA, 963 bp, synthetic construct
  misc_feature 1..963: note = Variant of adenosine kinase
  source 1..963: mol_type = other DNA
atgcaccatcatcaccatcacgggggctccggcatgagtgcactgatttgcggttctttagcgtatgataccatcatggtgtttccggaccagttcaagaaccatattctgcccgataaagttcacatcctcaatgtcagctttcttgtaccacgcatgcgtcgtgaatttggaggctgtgccggcaacattgcgtacaatctgcatctgttgggtggtgctccgatccctatgggaacggtgggccaagatttcggtccgtatcgcgagcacttcgaaactctgggcattgacttatcccgcgtcaagatcatcgatgatctgtttacaccgcaggccttcattaccaccgaccatgataacaaccagattacggcgtttcatccaggcgcaatgatgcgttcgtacgaaaatcacgttcgtgatgtgccgggtgttaccttgggcctcgtaggtcctgatggacgcgagggcatgatccaaaatgccgaagaatttgctgctggtggcattccgttcatttttgacccaggtcaggcaatgccgctgttcaacggccccgaactgcgcgagtttatcgaacaggcggactatgtggtggtcaacgattacgaaagcaatcttcttcaagaacgtactggctggaacgagcaggacattgtttcacgcgtgcaggcgtatatcaccacgcaaggtcctaaaggagccctggtacatacaccggagaagacctacgatattccgccggcacacgaaccgcgtgtcgttgatccaactggttgcggcgacgcgtttcgcgccggcctgatctatggtattcagcataattatgattggttgaccattggccgcatgggaaacttaatgggtgcgctgaaagtggaacaccctggcacgcaaaatcagcgtttcgattttgccgaattcaacgaccagttcaaacaacagtttggctacgcgctc

SEQ ID NO: 88 - protein, 321 aa, synthetic construct
  REGION 1..321: note = Variant of adenosine kinase
MHHHHHHGGSGMSALICGSLAYDTIMVFPDQFKNHILPDKVHILNVSFLVPRMRREFGGCAGNIAYNLHLLGGAPIPMGTVGQDFGPYREHFETLGIDLSRVKIIDDLFTPQAFITTDHDNNQITAFHPGAMMRSYENHVRDVPGVTLGLVGPDGREGMIQNAEEFAAGGIPFIFDPGQAMPLFNGPELREFIEQADYVVVNDYESNLLQERTGWNEQDIVSRVQAYITTQGPKGALVHTPEKTYDIPPAHEPRVVDPTGCGDAFRAGLIYGIQHNYDWLTIGRMGNLMGALKVEHPGTQNQRFDFAEFNDQFKQQFGYAL

SEQ ID NO: 89 - DNA, 963 bp, synthetic construct
  misc_feature 1..963: note = Variant of adenosine kinase
  source 1..963: mol_type = other DNA
atgcaccatcatcaccatcacgggggctccggcatgagtgcactgatttgcggttctttagcgtatgataccatcatggtgtttccggaccagttcaagaaccatattctgcccgataaagttcacatcctcaatgtcagctttcttgtaccacgcatgcgtcgtgaatttggaggctgtgccggcaacattgcgtacaatctgcatctgttgggtggtgctccgatccctatgggaacggtgggccaagatttcggtccgtatcgcgagcacttcgaaactctgggcattgacttatcccgcgtcaagatcatcgatgatctgtttacaccgcaggccttcattaccaccgaccatgatcataaccagattacggcgtttcatccaggcgcaatgatgcgttcgtacgaaaatcacgttcgtgatgtgccgggtgttaccttgggcctcgtaggtcctgatggacgcgagggcatgatccaaaatgccgaagaatttgctgctggtggcattccgttcatttttgacccaggtcaggcaatgccgctgttcaacggccccgaactgcgcgagtttatcgaacaggcggactatgtggtggtcaacgattacgaaagcaatcttcttcaagaacgtactggctggaacgagcaggacattgtttcacgcgtgcaggcgtatatcaccacgcaaggtcctaaaggagccctggtacatacaccggagaagacctacgatattccgccggcacacgaacgtcgtgtcgttgatccaactggttgcggcgacgcgtttcgcgccggcctgatctatggtattcagcataattatgattggttgaccattggccgcatgggaaacttaatgggtgcgctgaaagtggaacaccctggcacgcaaaatcagcgtttcgattttgccgaattcaacgaccagttcaaacaacagtttggctacgcgctc

SEQ ID NO: 90 - protein, 321 aa, synthetic construct
  REGION 1..321: note = Variant of adenosine kinase
MHHHHHHGGSGMSALICGSLAYDTIMVFPDQFKNHILPDKVHILNVSFLVPRMRREFGGCAGNIAYNLHLLGGAPIPMGTVGQDFGPYREHFETLGIDLSRVKIIDDLFTPQAFITTDHDHNQITAFHPGAMMRSYENHVRDVPGVTLGLVGPDGREGMIQNAEEFAAGGIPFIFDPGQAMPLFNGPELREFIEQADYVVVNDYESNLLQERTGWNEQDIVSRVQAYITTQGPKGALVHTPEKTYDIPPAHERRVVDPTGCGDAFRAGLIYGIQHNYDWLTIGRMGNLMGALKVEHPGTQNQRFDFAEFNDQFKQQFGYAL

SEQ ID NO: 91 - DNA, 963 bp, synthetic construct
  misc_feature 1..963: note = Variant of adenosine kinase
  source 1..963: mol_type = other DNA
atgcaccatcatcaccatcacgggggctccggcatgagtgcactgatttgcggttctttagcgtatgataccatcatggtgtttccggaccagttcaagaaccatattctgcccgataaagttcacatcctcaatgtcagctttcttgtaccacgcatgcgtcgtgaatttggaggctgtgccggcaacattgcgtacaatctgcatctgttgggtggtgctccgatccctatgggaacggtgggccaagatttcggtccgtatcgcgagcacttcgaaactctgggcattgacttatcccgcgtcaagatcatcgatgatctgtttacaccgcaggccttcattaccaccgaccatgataacaaccagattacggcgtttcatccaggcgcaatgatgcgttcgtacgaaaatcacgttcgtgatgtgccgggtgttaccttgggcctcgtaggtcctgatggacgcgagggcatgatccaaaatgccgaagaatttgctgctggtggcattccgttcatttttgacccaggtcaggcaatgccgctgttcaacggccccgaactgcgcgagtttatcgaacaggcggactatgtggtggtcaacgattacgaaagcaatcttcttgaggaacgtactggctggaacgagcaggacattgtttcacgcgtgcaggcgtatatcaccacgcaaggtcctaaaggagccctggtacatacaccggagaagacctacgatattccgccggcacacgaacgtcgtgtcgttgatccaactggttgcggcgacgcgtttcgcgccggcctgatctatggtattcagcataattatgattggttgaccattggccgcatgggaaacttaatgggtgcgctgaaagtggaacaccctggcacgcaaaatcagcgtttcgattttgccgaattcaacgaccagttcaaacaacagtttggctacgcgctc

SEQ ID NO: 92 - protein, 321 aa, synthetic construct
  REGION 1..321: note = Variant of adenosine kinase
MHHHHHHGGSGMSALICGSLAYDTIMVFPDQFKNHILPDKVHILNVSFLVPRMRREFGGCAGNIAYNLHLLGGAPIPMGTVGQDFGPYREHFETLGIDLSRVKIIDDLFTPQAFITTDHDNNQITAFHPGAMMRSYENHVRDVPGVTLGLVGPDGREGMIQNAEEFAAGGIPFIFDPGQAMPLFNGPELREFIEQADYVVVNDYESNLLEERTGWNEQDIVSRVQAYITTQGPKGALVHTPEKTYDIPPAHERRVVDPTGCGDAFRAGLIYGIQHNYDWLTIGRMGNLMGALKVEHPGTQNQRFDFAEFNDQFKQQFGYAL

SEQ ID NO: 93 - DNA, 963 bp, synthetic construct
  misc_feature 1..963: note = Variant of adenosine kinase
  source 1..963: mol_type = other DNA
atgcaccatcatcaccatcacgggggctccggcatgagtgcactgatttgcggttctttagcgtatgataccatcatggtgtttccggaccagttcaagaaccatattctgcccgataaagttcacatcctcaatgtcagctttcttgtaccacgcatgcgtcgtgaatttggaggctgtgccggcaacattgcgtacaatctgcatctgttgggtggtgctccgatccctatgggaacggtgggccaagatttcggtccgtatcgcgagcacttcgaaactctgggcattgacttatcccgcgtcaagatcatcgatgatctgtttacaccgcaggccttcattaccaccgaccatgataacaaccagattacggcgtttcatccaggcgcaatgatgcgttcgcacgaaaatcacgttcgtgatgtgccgggtgttaccttgggcctcgtaggtcctgatggacgcgagggcatgatccaaaatgccgaagaatttgctgctggtggcattccgttcatttttgacccaggtcaggcaatgccgctgttcaacggccccgaactgcgcgagtttatcgaacaggcggactatgtggtggtcaacgattacgaaagcaatcttcttcaagaacgtactggctggaacgagcaggacattgtttcacgcgtgcaggcgtatatcaccacgcaaggtcctaaaggagccctggtacatacaccggagaagacctacgatattccgggggcacacgaacgtcgtgtcgttgatccaactggttgcggcgacgcgtttcgcgccggcctgatctatggtattcagcataattatgattggttgaccattggccgcatgggaaacttaatgggtgcgctgaaagtggaacaccctggcacgcaaaatcagcgtttcgattttgccgaattcaacgaccagttcaaacaacagtttggctacgcgctc

SEQ ID NO: 94 - protein, 321 aa, synthetic construct
  REGION 1..321: note = Variant of adenosine kinase
MHHHHHHGGSGMSALICGSLAYDTIMVFPDQFKNHILPDKVHILNVSFLVPRMRREFGGCAGNIAYNLHLLGGAPIPMGTVGQDFGPYREHFETLGIDLSRVKIIDDLFTPQAFITTDHDNNQITAFHPGAMMRSHENHVRDVPGVTLGLVGPDGREGMIQNAEEFAAGGIPFIFDPGQAMPLFNGPELREFIEQADYVVVNDYESNLLQERTGWNEQDIVSRVQAYITTQGPKGALVHTPEKTYDIPGAHERRVVDPTGCGDAFRAGLIYGIQHNYDWLTIGRMGNLMGALKVEHPGTQNQRFDFAEFNDQFKQQFGYAL

SEQ ID NO: 95 - DNA, 963 bp, synthetic construct
  misc_feature 1..963: note = Variant of adenosine kinase
  source 1..963: mol_type = other DNA
atgcaccatcatcaccatcacgggggctccggcatgagtgcactgatttgcggttctttagcgtatgataccatcatggtgtttccggaccagttcaagaaccatattctgcccgataaagttcacatcctcaatgtcagctttcttgtaccacgcatgcgtcgtgaatttggaggctgtgccggcaacattgcgtacaatctgcatctgttgggtggtgctccgatccctatgggaacggtgggccaagatttcggtccgtatcgcgagcacttcgaaactctgggcattgacttatcccgcgtcaagatcatcgatgatctgtttacaccgcaggccttcattaccaccgaccatgataacaaccagattacggcgtttcatccaggcgcaatgatgcgttcgtacgaaaatcacgttcgtgatgtgccgggtgttaccttgggcctcgtaggtcctgatggacgcgagggcatgatccaaaatgccgaagaatttgctgctggtggcattccgttcatttttgacccaggtcaggcaatgccgctgttcaacggccccgaactgcgcgagtttatcgaacaggcggactatgtggtggtcaacgattacgaaagcaatgtgcttcaagaacgtactggctggaacgagcaggacattgtttcacgcgtgcaggcgtatatcaccacgcaaggtcctaaaggagccctggtacatacaccggagaagacctacgatattccgccggcacacgaacgtcgtgtcgttgatccaactggttgcggcgacgcgtttcgcgccggcctgatctatggtattcagcataattatgattggttgaccattggccgcatgggaaacttaatgggtgcgctgaaagtggaacaccctggcacgcaaaatcagcgtttcgattttgccgaattcaacgaccagttcaaacaacagtttggctacgcgctc

SEQ ID NO: 96 - protein, 321 aa, synthetic construct
  REGION 1..321: note = Variant of adenosine kinase
MHHHHHHGGSGMSALICGSLAYDTIMVFPDQFKNHILPDKVHILNVSFLVPRMRREFGGCAGNIAYNLHLLGGAPIPMGTVGQDFGPYREHFETLGIDLSRVKIIDDLFTPQAFITTDHDNNQITAFHPGAMMRSYENHVRDVPGVTLGLVGPDGREGMIQNAEEFAAGGIPFIFDPGQAMPLFNGPELREFIEQADYVVVNDYESNVLQERTGWNEQDIVSRVQAYITTQGPKGALVHTPEKTYDIPPAHERRVVDPTGCGDAFRAGLIYGIQHNYDWLTIGRMGNLMGALKVEHPGTQNQRFDFAEFNDQFKQQFGYAL

SEQ ID NO: 97 - DNA, 963 bp, synthetic construct
  misc_feature 1..963: note = Variant of adenosine kinase
  source 1..963: mol_type = other DNA
atgcaccatcatcaccatcacgggggctccggcatgagtgcactgatttgcggttctttagcgtatgataccatcatggtgtttccggaccagttcaagaagcatattctgcccgataaagttcacatcctcaatgtcagctttcttgtaccacgcatgcgtcgtgaatttggaggctgtgccggcaacattgcgtacaatctgcatctgttgggtggtgctccgatccctatgggaacggtgggccaagatttcggtccgtatcgcgagcacttcgaaactctgggcattgacttatcccgcgtcaagatcatcgatgatctgtttacaccgcaggccttcattaccaccgaccatgataacaaccagattacggcgtttcatccaggcgcaatgatgcgttcgtacgaaaatcacgttcgtgatgtgccgggtgttaccttgggcctcgtaggtcctgatggacgcgagggcatgatccaaaatgccgaagaatttgctgctggtggcattccgttcatttttgacccaggtcaggcaatgccgctgttcaacggccccgaactgcgcgagtttatcgaacaggcggactatgtggtggtcaacgattacgaaagcaatcttcttcaagaacgtactggctggaacgagcaggacattgtttcacgcgtgcaggcgtatatcaccacgcaaggtcctaaaggagccctggtacatacaccggagaagacctacgatattccgccggcacacgaacgtcgtgtcgttgatccaactggttgcggcgacgcgtttcgcgccggcctgatctatggtattcagcataattatgattggttgaccattggccgcatgggaaacttaatgggtgcgctgaaagtggaacaccctggcacgcaaaatcagcgtttcgattttgccgaattcaacgaccagttcaaacaacagtttggctacgcgctc

SEQ ID NO: 98 - protein, 321 aa, synthetic construct
  REGION 1..321: note = Variant of adenosine kinase
MHHHHHHGGSGMSALICGSLAYDTIMVFPDQFKKHILPDKVHILNVSFLVPRMRREFGGCAGNIAYNLHLLGGAPIPMGTVGQDFGPYREHFETLGIDLSRVKIIDDLFTPQAFITTDHDNNQITAFHPGAMMRSYENHVRDVPGVTLGLVGPDGREGMIQNAEEFAAGGIPFIFDPGQAMPLFNGPELREFIEQADYVVVNDYESNLLQERTGWNEQDIVSRVQAYITTQGPKGALVHTPEKTYDIPPAHERRVVDPTGCGDAFRAGLIYGIQHNYDWLTIGRMGNLMGALKVEHPGTQNQRFDFAEFNDQFKQQFGYAL

SEQ ID NO: 99 - DNA, 963 bp, synthetic construct
  misc_feature 1..963: note = Variant of adenosine kinase
  source 1..963: mol_type = other DNA
atgcaccatcatcaccatcacgggggctccggcatgagtgcactgatttgcggttctttagcgtatgataccatcatggtgtttccggaccagttcaagaaccatattctgcccgataaagttcacatcctcaatgtcagctttcttgtaccacgcatgcgtcgtgaatttggaggctgtgccggcaacattgcgtacaatctgcatctgttgggtggtgctccgatccctatgggaacggtgggccaagatttcggtccgtatcgcgagcacttcgaaactctgggcattgacttatcccgcgtcaagatcatcgattctctgtttacagctcaggccttcattaccaccgaccatgataacaaccagattacggcgtttcatccaggcgcaatgatgcgttcgtacgaaaatcacgttcgtgatgtgccgggtgttaccttgggcctcgtaggtcctgatggacgcgagggcatgatccaaaatgccgaagaatttgctgctggtggcattccgttcatttttgacccaggtcaggcaatgccgctgttcaacggccccgaactgcgcgagtttatcgaacaggcggactatgtggtggtcaacgattacgaaagcaatcttcttcaagaacgtactggctggaacgagcaggacattgtttcacgcgtgcaggcgtatatcaccacgcaaggtcctaaaggagccctggtacatacaccggagaagacctacgatattccgccggcacacgaacgtcgtgtcgttgatccaactggttgcggcgacgcgtttcgcgccggcctgatctatggtattcagcataattatgattggttgaccattggccgcatgggaaacttaatgggtgcgctgaaagtggaacaccctggcacgcaaaatcagcgtttcgattttgccgaattcaacgaccagttcaaacaacagtttggctacgcgctc

SEQ ID NO: 100 - protein, 321 aa, synthetic construct
  REGION 1..321: note = Variant of adenosine kinase
MHHHHHHGGSGMSALICGSLAYDTIMVFPDQFKNHILPDKVHILNVSFLVPRMRREFGGCAGNIAYNLHLLGGAPIPMGTVGQDFGPYREHFETLGIDLSRVKIIDSLFTAQAFITTDHDNNQITAFHPGAMMRSYENHVRDVPGVTLGLVGPDGREGMIQNAEEFAAGGIPFIFDPGQAMPLFNGPELREFIEQADYVVVNDYESNLLQERTGWNEQDIVSRVQAYITTQGPKGALVHTPEKTYDIPPAHERRVVDPTGCGDAFRAGLIYGIQHNYDWLTIGRMGNLMGALKVEHPGTQNQRFDFAEFNDQFKQQFGYAL

SEQ ID NO: 101 - DNA, 963 bp, synthetic construct
  misc_feature 1..963: note = Variant of adenosine kinase
  source 1..963: mol_type = other DNA
atgcaccatcatcaccatcacgggggctccggcatgagtgcactgatttgcggttctttagcgtatgataccatcatggtgtttccggaccagttcaagaaccatattctgcccgataaagttcacatcctcaatgtcagctttcttgtaccacgcatgcgtcgtgaatttggaggctgtgccggcaacattgcgtacaatctgcatctgttgggtggtgctccgatccctatgggaacggtgggccaagatttcggtccgtatcgcgagcacttcgaaactctgggcattgacttatcccgcgtcaagatcatcgatggtctgtttacagctcaggccttcattaccaccgaccatgataacaaccagattacggcgtttcatccaggcgcaatgatgcgttcgtacgaaaatcacgttcgtgatgtgccgggtgttaccttgggcctcgtaggtcctgatggacgcgagggcatgatccaaaatgccgaagaatttgctgctggtggcattccgttcatttttgacccaggtcaggcaatgccgctgttcaacggccccgaactgcgcgagtttatcgaacaggcggactatgtggtggtcaacgattacgaaagcaatcttcttcaagaacgtactggctggaacgagcaggacattgtttcacgcgtgcaggcgtatatcaccacgcaaggtcctaaaggagccctggtacatacaccggagaagacctacgatattccgccggcacacgaacgtcgtgtcgttgatccaactggttgcggcgacgcgtttcgcgccggcctgatctatggtattcagcataattatgattggttgaccattggccgcatgggaaacttaatgggtgcgctgaaagtggaacaccctggcacgcaaaatcagcgtttcgattttgccgaattcaacgaccagttcaaacaacagtttggctacgcgctc

SEQ ID NO: 102 - protein, 321 aa, synthetic construct
  REGION 1..321: note = Variant of adenosine kinase
MHHHHHHGGSGMSALICGSLAYDTIMVFPDQFKNHILPDKVHILNVSFLVPRMRREFGGCAGNIAYNLHLLGGAPIPMGTVGQDFGPYREHFETLGIDLSRVKIIDGLFTAQAFITTDHDNNQITAFHPGAMMRSYENHVRDVPGVTLGLVGPDGREGMIQNAEEFAAGGIPFIFDPGQAMPLFNGPELREFIEQADYVVVNDYESNLLQERTGWNEQDIVSRVQAYITTQGPKGALVHTPEKTYDIPPAHERRVVDPTGCGDAFRAGLIYGIQHNYDWLTIGRMGNLMGALKVEHPGTQNQRFDFAEFNDQFKQQFGYAL

SEQ ID NO: 103 - DNA, 963 bp, synthetic construct
  misc_feature 1..963: note = Variant of adenosine kinase
  source 1..963: mol_type = other DNA
atgcaccatcatcaccatcacgggggctccggcatgagtgcactgatttgcggttctttagcgtatgataccatcatggtgtttccggaccagttcaagaaccatattctgcccgataaagttcacatcctcaatgtcagctttcttgtaccacgcatgcgtcgtgaatttggaggctgtgccggcaacattgcgtacaatctgcatctgttgggtggtgctccgatccctatgggaacggtgggccaagatttcggtccgtatcgcgagcacttcgaaactctgggcattgacttatcccgcgtcaagatcatcgatgatctgtttacaccgcaggccttcattaccaccgaccatgataacaaccagattacggcgtttcatccaggcgcaatgatgcgttcgtacgaaaatcacgttcgtgatgtgccgggtgttaccttgggcctcgtaggtcctgatggacgcgagggcatgatccaaaatgccgaagaatttgctgctggtggcattccgttcatttttgacccaggtcaggcaatgccgctgttcaacggccccgaactgcgcgagtttatcgaacaggcggactatgtggtggtcaacgattacgaaagcaatcttcttcaaacgcgtactggctggaacgagcaggacattgtttcacgcgtgcaggcgtatatcaccacgcaaggtcctaaaggagccctggtacatacaccggagaagacctacgatattccgccggcacacgaacgtcgtgtcgttgatccaactggttgcggcgacgcgtttcgcgccggcctgatctatggtattcagcataattatgattggttgaccattggccgcatgggaaacttaatgggtgcgctgaaagtggaacaccctggcacgcaaaatcagcgtttcgattttgccgaattcaacgaccagttcaaacaacagtttggctacgcgctc

SEQ ID NO: 104 - protein, 321 aa, synthetic construct
  REGION 1..321: note = Variant of adenosine kinase
MHHHHHHGGSGMSALICGSLAYDTIMVFPDQFKNHILPDKVHILNVSFLVPRMRREFGGCAGNIAYNLHLLGGAPIPMGTVGQDFGPYREHFETLGIDLSRVKIIDDLFTPQAFITTDHDNNQITAFHPGAMMRSYENHVRDVPGVTLGLVGPDGREGMIQNAEEFAAGGIPFIFDPGQAMPLFNGPELREFIEQADYVVVNDYESNLLQTRTGWNEQDIVSRVQAYITTQGPKGALVHTPEKTYDIPPAHERRVVDPTGCGDAFRAGLIYGIQHNYDWLTIGRMGNLMGALKVEHPGTQNQRFDFAEFNDQFKQQFGYAL

SEQ ID NO: 105 - DNA, 963 bp, synthetic construct
  misc_feature 1..963: note = Variant of adenosine kinase
  source 1..963: mol_type = other DNA
atgcaccatcatcaccatcacgggggctccggcatgagtgcactgatttgcggttctttagcgtatgataccatcatggtgtttccggaccagttcaagaaccatattctgcccgataaagttcacatcctcaatgtcagctttcttgtaccacgcatgcgtcgtgaatttggaggctgtgccggcaacattgcgtacaatctgcatctgttgggtggtgctccgatccctatgggaacggtgggccaagatttcggtccgtatcgcgagcacttcgaaactctgggcattgacttatcccgcgtcaagatcatcgatgatctgtttacaccgcaggccttcattaccaccgaccatgataacaaccagattacggcgtttcatccaggcgcaatgatgcgttcgtacgaaaatcacgttcgtgatgtgccgggtgttaccttgggcctcgtaggtcctgatggacgcgagggcatgatccaaaatgccgaagaatttgctgctggtggcattccgttcatttttgacccaggtcaggcaatgccgctgttcaacggccccgaactgcgcgagtttatcgaacaggcggactatgtggtggtcaacgattacgaaagcaatcttcttcaagaacgtactggctggaacgagcaggacattgtttcacgcgtgcaggcatatatcaccacgcaaggtcctaaaggagccctggtacatacaccggagaagacctacgatattccgccggcacacgaacgtcgtgtcgttgatccaactggttgcggcgacgcgtttcgcgccggcctgatctatggtattcagcataattatgattggttgaccattggccgcatgggaaacttaatgggtgcgctgaaagtggaacaccctggcacgcaaaatcagcgtttcgattttgcctttttcaacgaccagttcaaacaacagtttggctacgcgctc

SEQ ID NO: 106 - protein, 321 aa, synthetic construct
  REGION 1..321: note = Variant of adenosine kinase
MHHHHHHGGSGMSALICGSLAYDTIMVFPDQFKNHILPDKVHILNVSFLVPRMRREFGGCAGNIAYNLHLLGGAPIPMGTVGQDFGPYREHFETLGIDLSRVKIIDDLFTPQAFITTDHDNNQITAFHPGAMMRSYENHVRDVPGVTLGLVGPDGREGMIQNAEEFAAGGIPFIFDPGQAMPLFNGPELREFIEQADYVVVNDYESNLLQERTGWNEQDIVSRVQAYITTQGPKGALVHTPEKTYDIPPAHERRVVDPTGCGDAFRAGLIYGIQHNYDWLTIGRMGNLMGALKVEHPGTQNQRFDFAFFNDQFKQQFGYAL

SEQ ID NO: 107 - DNA, 963 bp, synthetic construct
  misc_feature 1..963: note = Variant of adenosine kinase
  source 1..963: mol_type = other DNA
atgcaccatcatcaccatcacgggggctccggcatgagtgcactgatttgcggttctttagcgtatgataccatcatggtgtttccggaccagttcaagaaccatattctgcccgataaagttcacatcctcaatgtcagctttcttgtaccacgcatgcgtcgtgaatttggaggctgtgccggcaacattgcgtacaatctgcatctgttgggtggtgctccgatccctatgggaacggtgggccaagatttcggtccgtatcgcgagcacttcgaaactctgggcattgacttatcccgcgtcaagatcatcgatgatctgtttacaccgcaggccttcattaccaccgaccatgataacaaccagattacggcgtttcatccaggcgcaatgatgcgttcgtacgaaaatcacgttcgtgatgtgccgggtgttaccttgggcctcgtaggtcctgatggacgcgagggcatgatccaaaatgccgaagaatttgctgctggtggcattccgttcatttttgacccaggtcaggcattgccgctgttcaacggccccgaactgcgcgagtttatcgaacaggcggactatgtggtggtcaacgattacgaaagcaatcttcttcaagaacgtactggctggaacgagcaggacattgtttcacgcgtgcaggcgtatatcaccacgcaaggtcctaaaggagccctggtacatacaccggagaagacctacgatattccgccggcacacgaacgtcgtgtcgttgatccaactggttgcggcgacgcgtttcgcgccggcctgatctatggtattcagcataattatgattggttgaccattggccgcatgggaaacttaatgggtgcgctgaaagtggaacaccctggcacgcaaaatcagcgtttcgattttgccgaattcaacgaccagttcaaacaacagtttggctacgcgctc

SEQ ID NO: 108 - protein, 321 aa, synthetic construct
  REGION 1..321: note = Variant of adenosine kinase
MHHHHHHGGSGMSALICGSLAYDTIMVFPDQFKNHILPDKVHILNVSFLVPRMRREFGGCAGNIAYNLHLLGGAPIPMGTVGQDFGPYREHFETLGIDLSRVKIIDDLFTPQAFITTDHDNNQITAFHPGAMMRSYENHVRDVPGVTLGLVGPDGREGMIQNAEEFAAGGIPFIFDPGQALPLFNGPELREFIEQADYVVVNDYESNLLQERTGWNEQDIVSRVQAYITTQGPKGALVHTPEKTYDIPPAHERRVVDPTGCGDAFRAGLIYGIQHNYDWLTIGRMGNLMGALKVEHPGTQNQRFDFAEFNDQFKQQFGYAL

SEQ ID NO: 109 - DNA, 963 bp, synthetic construct
  misc_feature 1..963: note = Variant of adenosine kinase
  source 1..963: mol_type = other DNA
atgcaccatcatcaccatcacgggggctccggcatgagtgcactgatttgcggttctttagcgtatgataccatcatggtgtttccggaccagttcaagaaccatattctgcccgataaagttcacatcctcaatgtcagctttcttgtaccacgcatgcgtcgtgaatttggaggctgtgccggcaacattgcgtacaatctgcatctgttgggtggtgctccgatccctatgggaacggtgggccaagatttcggtccgtatcgcgagcacttcgaaactctgggcattgacttatcccgcgtcaagatcatcgatgatctgtttacaccgcaggccttcattaccaccgaccatgataacaaccagattacggcgtttcatccaggcgcaatgatgcgttcgtacgaaaatcacgttcgtgatgtgccgggtgttaccttgggcctcgtaggtcctgatggacgcgagggcatgatccaaaatgccgaagaatttgctgctggtggcattccgttcatttttgacccaggtcaggcaatgccgctgttcaacggccccgaactgcgcgagtttatcgaacaggcggactatgtggtggtcaacgattacgaaagcaatcttcttcaagaacgtactggctggaacgagcaggacattgtttcacgcgtgcaggcgtatatcaccacgcaaggtgttaaaggagccctggtacatacaccggagaagacctacgatattccgccggcacacgaacgtcgtgtcgttgatccaactggttgcggcgacgcgtttcgcgccggcctgatctatggtattcagcataattatgattggttgaccattggccgcatgggaaacttaatgggtgcgctgaaagtggaacaccctggcacgcaaaatcagcgtttcgattttgccgaattcaacgaccagttcaaacaacagtttggctacgcgctc

SEQ ID NO: 110 - protein, 321 aa, synthetic construct
  REGION 1..321: note = Variant of adenosine kinase
MHHHHHHGGSGMSALICGSLAYDTIMVFPDQFKNHILPDKVHILNVSFLVPRMRREFGGCAGNIAYNLHLLGGAPIPMGTVGQDFGPYREHFETLGIDLSRVKIIDDLFTPQAFITTDHDNNQITAFHPGAMMRSYENHVRDVPGVTLGLVGPDGREGMIQNAEEFAAGGIPFIFDPGQAMPLFNGPELREFIEQADYVVVNDYESNLLQERTGWNEQDIVSRVQAYITTQGVKGALVHTPEKTYDIPPAHERRVVDPTGCGDAFRAGLIYGIQHNYDWLTIGRMGNLMGALKVEHPGTQNQRFDFAEFNDQFKQQFGYAL

SEQ ID NO: 111 - DNA, 963 bp, synthetic construct
  misc_feature 1..963: note = Variant of adenosine kinase
  source 1..963: mol_type = other DNA
atgcaccatcatcaccatcacgggggctccggcatgagtgcactgatttgcggttctttagcgtatgataccatcatggtgtttccggaccagttcaagaaccatattctgcccgataaagttcacatcctcaatgtcagctttcttgtaccacgcatgcgtcgtgaatttggaggctgtgccggcaacattgcgtacaatctgcatctgttgggtggtgctccgatccctatgggaacggtgggccaagatttcggtccgtatcgcgagcacttcgaaactctgggcattgacttatcccgcgtcaagatcatcgatgcgctgtttacagctcaggccttcattaccaccgaccatgataacaaccagattacggcgtttcatccaggcgcaatgatgcgttcgtacgaaaatcacgttcgtgatgtgccgggtgttaccttgggcctcgtaggtcctgatggacgcgagggcatgatccaaaatgccgaagaatttgctgctggtggcattccgttcatttttgacccaggtcaggcaatgccgctgttcaacggccccgaactgcgcgagtttatcgaacaggcggactatgtggtggtcaacgattacgaaagcaatcttcttcaagaacgtactggctggaacgagcaggacattgtttcacgcgtgcaggcgtatatcaccacgcaaggtcctaaaggagccctggtacatacaccggagaagacctacgatattccgccggcacacgaacgtcgtgtcgttgatccaactggttgcggcgacgcgtttcgcgccggcctgatctatggtattcagcataattatgattggttgaccattggccgcatgggaaacttaatgggtgcgctgaaagtggaacaccctggcacgcaaaatcagcgtttcgattttgccgaattcaacgaccagttcaaacaacagtttggctacgcgctc

SEQ ID NO: 112 - protein, 321 aa, synthetic construct
  REGION 1..321: note = Variant of adenosine kinase
MHHHHHHGGSGMSALICGSLAYDTIMVFPDQFKNHILPDKVHILNVSFLVPRMRREFGGCAGNIAYNLHLLGGAPIPMGTVGQDFGPYREHFETLGIDLSRVKIIDALFTAQAFITTDHDNNQITAFHPGAMMRSYENHVRDVPGVTLGLVGPDGREGMIQNAEEFAAGGIPFIFDPGQAMPLFNGPELREFIEQADYVVVNDYESNLLQERTGWNEQDIVSRVQAYITTQGPKGALVHTPEKTYDIPPAHERRVVDPTGCGDAFRAGLIYGIQHNYDWLTIGRMGNLMGALKVEHPGTQNQRFDFAEFNDQFKQQFGYAL

SEQ ID NO: 113 - DNA, 963 bp, synthetic construct
  misc_feature 1..963: note = Variant of adenosine kinase
  source 1..963: mol_type = other DNA
atgcaccatcatcaccatcacgggggctccggcatgagtgcactgatttgcggttctttagcgtatgataccatcatggtgtttccggaccagttcaagcggcatattctgcccgataaagttcacatcctcaatgtcagctttcttgtaccacgcatgcgtcgtgaatttggaggctgtgccggcaacattgcgtacaatctgcatctgttgggtggtgctccgatccctatgggaacggtgggccaagatttcggtccgtatcgcgagcacttcgaaactctgggcattgacttatcccgcgtcaagatcatcgatgatctgtttacaccgcaggccttcattaccaccgaccatgataacaaccagattacggcgtttcatccaggcgcaatgatgcgttcgtacgaaaatcacgttcgtgatgtgccgggtgttaccttgggcctcgtaggtcctgatggacgcgagggcatgatccaaaatgccgaagaatttgctgctggtggcattccgttcatttttgacccaggtcaggcaatgccgctgttcaacggccccgaactgcgcgagtttatcgaacaggcggactatgtggtggtcaacgattacgaaagcaatcttcttcaagaacgtactggctggaacgagcaggacattgtttcacgcgtgcaggcgtatatcaccacgcaaggtcctaaaggagccctggtacatacaccggagaagacctacgatattccgccggcacacgaacgtcgtgtcgttgatccaactggttgcggcgacgcgtttcgcgccggcctgatctatggtattcagcataattatgattggttgaccattggccgcatgggaaacttaatgggtgcgctgaaagtggaacaccctggcacgcaaaatcagcgtttcgattttgccgaattcaacgaccagttcaaacaacagtttggctacgcgctc

SEQ ID NO: 114 - protein, 321 aa, synthetic construct
  REGION 1..321: note = Variant of adenosine kinase
MHHHHHHGGSGMSALICGSLAYDTIMVFPDQFKRHILPDKVHILNVSFLVPRMRREFGGCAGNIAYNLHLLGGAPIPMGTVGQDFGPYREHFETLGIDLSRVKIIDDLFTPQAFITTDHDNNQITAFHPGAMMRSYENHVRDVPGVTLGLVGPDGREGMIQNAEEFAAGGIPFIFDPGQAMPLFNGPELREFIEQADYVVVNDYESNLLQERTGWNEQDIVSRVQAYITTQGPKGALVHTPEKTYDIPPAHERRVVDPTGCGDAFRAGLIYGIQHNYDWLTIGRMGNLMGALKVEHPGTQNQRFDFAEFNDQFKQQFGYAL

SEQ ID NO: 115 - DNA, 963 bp, synthetic construct
  misc_feature 1..963: note = Variant of adenosine kinase
  source 1..963: mol_type = other DNA
atgcaccatcatcaccatcacgggggctccggcatgagtgcactgatttgcggttctttagcgtatgataccatcatggtgtttccggaccagttcaagaaccatattctggtggataaagttcacatcctcaatgtcagctttcttgtaccacgcatgcgtcgtgaatttggaggctgtgccggcaacattgcgtacaatctgcatctgttgggtggtgctccgatccctatgggaacggtgggccaagatttcggtccgtatcgcgagcacttcgaaactctgggcattgacttatcccgcgtcaagatcatcgatgatctgtttacaccgcaggccttcattaccaccgaccatgataacaaccagattacggcgtttcatccaggcgcaatgatgcgttcgtacgaaaatcacgttcgtgatgtgccgggtgttaccttgggcctcgtaggtcctgatggacgcgagggcatgatccaaaatgccgaagaatttgctgctggtggcattccgttcatttttgacccaggtcaggcaatgccgctgttcaacggccccgaactgcgcgagtttatcgaacaggcggactatgtggtggtcaacgattacgaaagcaatcttcttcaagaacgtactggctggaacgagcaggacattgtttcacgcgtgcaggcgtatatcaccacgcaaggtcctaaaggagccctggtacatacaccggagaagacctacgatattccgccggcacacgaacgtcgtgtcgttgatccaactggttgcggcgacgcgtttcgcgccggcctgatctatggtattcagcataattatgattggttgaccattggccgcatgggaaacttaatgggtgcgctgaaagtggaacaccctggcacgcaaaatcagcgtttcgattttgccgaattcaacgaccagttcaaacaacagtttggctacgcgctc

SEQ ID NO: 116 - protein, 321 aa, synthetic construct
  REGION 1..321: note = Variant of adenosine kinase
MHHHHHHGGSGMSALICGSLAYDTIMVFPDQFKNHILVDKVHILNVSFLVPRMRREFGGCAGNIAYNLHLLGGAPIPMGTVGQDFGPYREHFETLGIDLSRVKIIDDLFTPQAFITTDHDNNQITAFHPGAMMRSYENHVRDVPGVTLGLVGPDGREGMIQNAEEFAAGGIPFIFDPGQAMPLFNGPELREFIEQADYVVVNDYESNLLQERTGWNEQDIVSRVQAYITTQGPKGALVHTPEKTYDIPPAHERRVVDPTGCGDAFRAGLIYGIQHNYDWLTIGRMGNLMGALKVEHPGTQNQRFDFAEFNDQFKQQFGYAL

SEQ ID NO: 117 - DNA, 963 bp, synthetic construct
  misc_feature 1..963: note = Variant of adenosine kinase
  source 1..963: mol_type = other DNA
atgcaccatcatcaccatcacgggggctccggcatgagtgcactgatttgcggttctttagcgtatgataccatcatggtgtttccggaccagttcaagaaccatattctgcccgataaagttcacatcctcaatgtcagctttcttgtaccacgcatgcgtcgtgaatttggaggctgtgccggcaacattgcgtacaatctgcatctgttgggtggtgctccgatccctatgggaacggtgggccaagatttcggtccgtatcgcgagcacttcgaaactctgggcattgacttatcccgcgtcaagatcatcgatgatctgtttacaccgcaggccttcattaccaccgaccatgataacaaccagattacggcgtttcatccaggcgcaatgatgcgttcgtacgaaaatcacgttcgtgatgtgccgggtgttaccttgggcctcgtaggtcctgatggacgcgagggcatgatccaaaatgccgaagaatttgctgctggtggcattccgttcatttttgacccaggtcaggcaatgccgctgttcaacggccccgaactgcgcgagtttatcgaacaggcggactatgtggtggtcaacgattacgaaagcaatcttcttcaagaacgtactggctggaacgagcaggacattgtttcacgcgtgcaggcgtatatcaccacgcaaggtcctaaaggagccctggtacatacaccggagaagacctacgatattcggccggcacacgaacgtcgtgtcgttgatccaactggttgcggcgacgcgtttcgcgccggcctgatctatggtattcagcataattatgattggttgaccattggccgcatgggaaacttaatgggtgcgctgaaagtggaacaccctggcacgcaaaatcagcgtttcgattttgccgaattcaacgaccagttcaaacaacagtttggctacgcgctc

SEQ ID NO: 118 - protein, 321 aa, synthetic construct
  REGION 1..321: note = Variant of adenosine kinase
MHHHHHHGGSGMSALICGSLAYDTIMVFPDQFKNHILPDKVHILNVSFLVPRMRREFGGCAGNIAYNLHLLGGAPIPMGTVGQDFGPYREHFETLGIDLSRVKIIDDLFTPQAFITTDHDNNQITAFHPGAMMRSYENHVRDVPGVTLGLVGPDGREGMIQNAEEFAAGGIPFIFDPGQAMPLFNGPELREFIEQADYVVVNDYESNLLQERTGWNEQDIVSRVQAYITTQGPKGALVHTPEKTYDIRPAHERRVVDPTGCGDAFRAGLIYGIQHNYDWLTIGRMGNLMGALKVEHPGTQNQRFDFAEFNDQFKQQFGYAL

SEQ ID NO: 119 - DNA, 963 bp, synthetic construct
  misc_feature 1..963: note = Variant of adenosine kinase
  source 1..963: mol_type = other DNA
atgcaccatcatcaccatcacgggggctccggcatgagtgcactgatttgcggttctttagcgtatgataccatcatggtgtttccggaccagttcaagaaccatattctgcccgataaagttcacatcctcaatgtcagctttcttgtaccacgcatgcgtcgtagttttggaggctgtgccggcaacattgcgtacaatctgcatctgttgggtggtgctccgatccctatgggaacggtgggccaagatttcggtccgtatcgcgagcacttcgaaactctgggcattgacttatcccgcgtcaagatcatcgatgatctgtttacaccgcaggccttcattaccaccgaccatgataacaaccagattacggcgtttcatccaggcgcaatgatgcgttcgtacgaaaatcacgttcgtgatgtgccgggtgttaccttgggcctcgtaggtcctgatggacgcgagggcatgatccaaaatgccgaagaatttgctgctggtggcattccgttcatttttgacccaggtcaggcaatgccgctgttcaacggccccgaactgcgcgagtttatcgaacaggcggactatgtggtggtcaacgattacgaaagcaatcttcttcaagaacgtactggctggaacgagcaggacattgtttcacgcgtgcaggcgtatatcaccacgcaaggtcctaaaggagccctggtacatacaccggagaagacctacgatattccgccggcacacgaacgtcgtgtcgttgatccaactggttgcggcgacgcgtttcgcgccggcctgatctatggtattcagcataattatgattggttgaccattggccgcatgggaaacttaatgggtgcgctgaaagtggaacaccctggcacgcaaaatcagcgtttcgattttgccgaattcaacgaccagttcaaacaacagtttggctacgcgctc

SEQ ID NO: 120 - protein, 321 aa, synthetic construct
  REGION 1..321: note = Variant of adenosine kinase
MHHHHHHGGSGMSALICGSLAYDTIMVFPDQFKNHILPDKVHILNVSFLVPRMRRSFGGCAGNIAYNLHLLGGAPIPMGTVGQDFGPYREHFETLGIDLSRVKIIDDLFTPQAFITTDHDNNQITAFHPGAMMRSYENHVRDVPGVTLGLVGPDGREGMIQNAEEFAAGGIPFIFDPGQAMPLFNGPELREFIEQADYVVVNDYESNLLQERTGWNEQDIVSRVQAYITTQGPKGALVHTPEKTYDIPPAHERRVVDPTGCGDAFRAGLIYGIQHNYDWLTIGRMGNLMGALKVEHPGTQNQRFDFAEFNDQFKQQFGYAL

SEQ ID NO: 121 - DNA, 963 bp, synthetic construct
  misc_feature 1..963: note = Variant of adenosine kinase
  source 1..963: mol_type = other DNA
atgcaccatcatcaccatcacgggggctccggcatgagtgcactgatttgcggttctttagcgtatgataccatcatggtgtttccggaccagttcaagaaccatattctgcccgataaagttcacatcctcaatgtcagctttcttgtaccacgcatgcgtcgtgaatttggaggctgtgccggcaacattgcgtacaatctgcatctgttgggtggtgctccgatccctatgggaacggtgggccaagatttcggtccgtatcgcgagcacttcgaaactctgggcattgacttatcccgcgtcaagatcatcgatgatctgtttacaccgcaggccttcattaccaccgaccatgataacaaccagattacggcgtttcatccaggcgcaatgatgcgttcgtacgaaaatcacgttcgtgatgtgccgggtgttaccttgggcctcgtaggtcctgatggacgcgagggcatgatccaaaatgccgaagaatttgctgctggtggcattccgttcatttttgacccaggtcaggcaatgccgctgttcaacggccccgaactgcgcgagtttatcgaacaggcggactatgtggtggtcaacgattacgaaagcaatcttcttcaagaacgtactggctggaacgagcaggacattgtttcacgcgtgcaggcgtatatcaccacgcaaggtcctaaaggagccctggtacatacaccggagaagacctacgatattccgccggcacacgaacgtcgtgtcgttgatccaactggttgcggcgacgcgtttcgcgccggcctgatctatggtattcagcataattatgattggttgaccattggccgcatgggaaacttaatgggtgcgctgaaagtggaacaccctggcacgcaaaatcagcgtttcgattttgccgaattcaacgaccagttcaaacaaaagtttggctacgcgctc

SEQ ID NO: 122 - protein, 321 aa, synthetic construct
  REGION 1..321: note = Variant of adenosine kinase
MHHHHHHGGSGMSALICGSLAYDTIMVFPDQFKNHILPDKVHILNVSFLVPRMRREFGGCAGNIAYNLHLLGGAPIPMGTVGQDFGPYREHFETLGIDLSRVKIIDDLFTPQAFITTDHDNNQITAFHPGAMMRSYENHVRDVPGVTLGLVGPDGREGMIQNAEEFAAGGIPFIFDPGQAMPLFNGPELREFIEQADYVVVNDYESNLLQERTGWNEQDIVSRVQAYITTQGPKGALVHTPEKTYDIPPAHERRVVDPTGCGDAFRAGLIYGIQHNYDWLTIGRMGNLMGALKVEHPGTQNQRFDFAEFNDQFKQKFGYAL

SEQ ID NO: 123 - DNA, 963 bp, synthetic construct
  misc_feature 1..963: note = Variant of adenosine kinase
  source 1..963: mol_type = other DNA
atgcaccatcatcaccatcacgggggctccggcatgagtgcactgatttgcggttctttagcgtatgataccatcatggtgtttccggaccagttcaagaaccatattctgcccgataaagttcacatcctcaatgtcagctttcttgtaccacgcatgcgtcgtgaatttggaggctgtgccggcaacattgcgtacaatctgcatctgttgggtggtgctccgatccctatgggaacggtgggccaagatttcggtccgtatcgcgagcacttcgaaactctgggcattgacttatcccgcgtcaagatcatcgatgatctgtttacaccgcaggccttcattaccaccgaccatgataacaaccagattacggcgtttcatccaggcgcaatgatgcgttcgtacgaaaatcacgttcgtgatgtgccgggtgttaccttgggcctcgtaggtcctgatggacgcgagggcatgatccaaaatgccgaagaatttgctgctggtggcattccgttcatttttgacccaggtcaggcaatgccgctgttcaacggccccgaactgcgcgagtttatcgaacaggcggactatgtggtggtcaacgattacgaaagcaatcttcttcaagaacgtactggctggaacgagcaggacattgtttcacgcgtgcaggcgtatatcaccacgcaaggtcctaaaggagccctggtacatacaccggagaagacctacgatattgtgccggcacacgaacgtcgtgtcgttgatccaactggttgcggcgacgcgtttcgcgccggcctgatctatggtattcagcataattatgattggttgaccattggccgcatgggaaacttaatgggtgcgctgaaagtggaacaccctggcacgcaaaatcagcgtttcgattttgccgaattcaacgaccagttcaaacaacagtttggctacgcgctc

SEQ ID NO: 124 - protein, 321 aa, synthetic construct
  REGION 1..321: note = Variant of adenosine kinase
MHHHHHHGGSGMSALICGSLAYDTIMVFPDQFKNHILPDKVHILNVSFLVPRMRREFGGCAGNIAYNLHLLGGAPIPMGTVGQDFGPYREHFETLGIDLSRVKIIDDLFTPQAFITTDHDNNQITAFHPGAMMRSYENHVRDVPGVTLGLVGPDGREGMIQNAEEFAAGGIPFIFDPGQAMPLFNGPELREFIEQADYVVVNDYESNLLQERTGWNEQDIVSRVQAYITTQGPKGALVHTPEKTYDIVPAHERRVVDPTGCGDAFRAGLIYGIQHNYDWLTIGRMGNLMGALKVEHPGTQNQRFDFAEFNDQFKQQFGYAL

SEQ ID NO: 125 - DNA, 963 bp, synthetic construct
  misc_feature 1..963: note = Variant of adenosine kinase
  source 1..963: mol_type = other DNA
atgcaccatcatcaccatcacgggggctccggcatgagtgcactgatttgcggttctttagcgtatgataccatcatggtgtttccggaccagttcaagaaccatattctgcccgataaagttcacatcctcaatgtcagctttcttgtaccacgcatgcgtcgtgaatttggaggctgtgccggcaacattgcgtacaatctgcatctgttgggtggtgctccgatccctatgggaacggtgggccaagatttcggtccgtatcgcgagcacttcgaaactctgggcattgacttatcccgcgtcaagatcatcgatgatctgtttacaccgcaggccttcattaccaccgaccatgataacaaccagattacggcgtttcatccaggcgcaatgatgcgttcgtacgaaaatcacgttcgtgatgtgccgggtgttaccttgggcctcgtaggtcctgatggacgcgagggcatgatccaaaatgccgaagaatttgctgctggtggcattccgttcatttttgacccaggtcaggcaatgccgctgttcaacggccccgaactgcgcgagtttatcgaacaggcggactatgtggtggtcaacgattacgaaagcaatcttcttcaagaacgtactggctggaacgagcaggacattgtttcacgcgtgcaggcgtatatcaccacgcaaggtcctaaaggagccctggtacatacaccggagaagacctacgatattaagccggcacacgaacgtcgtgtcgttgatccaactggttgcggcgacgcgtttcgcgccggcctgatctatggtattcagcataattatgattggttgaccattggccgcatgggaaacttaatgggtgcgctgaaagtggaacaccctggcacgcaaaatcagcgtttcgattttgccgaattcaacgaccagttcaaacaacagtttggctacgcgctc

SEQ ID NO: 126 - protein, 321 aa, synthetic construct
  REGION 1..321: note = Variant of adenosine kinase
MHHHHHHGGSGMSALICGSLAYDTIMVFPDQFKNHILPDKVHILNVSFLVPRMRREFGGCAGNIAYNLHLLGGAPIPMGTVGQDFGPYREHFETLGIDLSRVKIIDDLFTPQAFITTDHDNNQITAFHPGAMMRSYENHVRDVPGVTLGLVGPDGREGMIQNAEEFAAGGIPFIFDPGQAMPLFNGPELREFIEQADYVVVNDYESNLLQERTGWNEQDIVSRVQAYITTQGPKGALVHTPEKTYDIKPAHERRVVDPTGCGDAFRAGLIYGIQHNYDWLTIGRMGNLMGALKVEHPGTQNQRFDFAEFNDQFKQQFGYAL

SEQ ID NO: 127 - DNA, 963 bp, synthetic construct
  misc_feature 1..963: note = Variant of adenosine kinase
  source 1..963: mol_type = other DNA
atgcaccatcatcaccatcacgggggctccggcatgagtgcactgatttgcggttctttagcgtatgataccatcatggtgtttccggaccagttcaagaaccatattctgcccgataaagttcacatcctcaatgtcagctttcttgtaccacgcatgcgtcgtgaatttggaggctgtgccggcaacattgcgtacaatctgcatctgttgggtggtgctccgatccctatgggaacggtgggccaagatttcggtccgtatacggagcacttcgaaactctgggcattgacttatcccgcgtcaagatcatcgatgatctgtttacaccgcaggccttcattaccaccgaccatgataacaaccagattacggcgtttcatccaggcgcaatgatgcgttcgtacgaaaatcacgttcgtgatgtgccgggtgttaccttgggcctcgtaggtcctgatggacgcgagggcatgatccaaaatgccgaagaatttgctgctggtggcattccgttcatttttgacccaggtcaggcaatgccgctgttcaacggccccgaactgcgcgagtttatcgaacaggcggactatgtggtggtcaacgattacgaaagcaatcttcttcaagaacgtactggctggaacgagcaggacattgtttcacgcgtgcaggcgtatatcaccacgcaaggtcctaaaggagccctggtacatacaccggagaagacctacgatattccgccggcacacgaacgtcgtgtcgttgatccaactggttgcggcgacgcgtttcgcgccggcctgatctatggtattcagcataattatgattggttgaccattggccgcatgggaaacttaatgggtgcgctgaaagtggaacaccctggcacgcaaaatcagcgtttcgattttgccgaattcaacgaccagttcaaacaacagtttggctacgcgctc

SEQ ID NO: 128 - protein, 321 aa, synthetic construct
  REGION 1..321: note = Variant of adenosine kinase
MHHHHHHGGSGMSALICGSLAYDTIMVFPDQFKNHILPDKVHILNVSFLVPRMRREFGGCAGNIAYNLHLLGGAPIPMGTVGQDFGPYTEHFETLGIDLSRVKIIDDLFTPQAFITTDHDNNQITAFHPGAMMRSYENHVRDVPGVTLGLVGPDGREGMIQNAEEFAAGGIPFIFDPGQAMPLFNGPELREFIEQADYVVVNDYESNLLQERTGWNEQDIVSRVQAYITTQGPKGALVHTPEKTYDIPPAHERRVVDPTGCGDAFRAGLIYGIQHNYDWLTIGRMGNLMGALKVEHPGTQNQRFDFAEFNDQFKQQFGYAL

SEQ ID NO: 129 - DNA, 963 bp, synthetic construct
  misc_feature 1..963: note = Variant of adenosine kinase
  source 1..963: mol_type = other DNA
atgcaccatcatcaccatcacgggggctccggcatgagtgcactgatttgcggttctttagcgtatgataccatcatggtgtttccggaccagttcaagaaccatattctgcccgataaagttcacatcctcaatgtcagctttcttgtaccacgcatgcgtcgtgaatttggaggctgtgccggcaacattgcgtacaatctgcatctgttgggtggtgctccgatccctatgggaacggtgggccaagatttcggtccgtatcgcgagcacttcgaaactctgggcattgacttatcccgcgtcaagatcatcgatgatctgtttacaccgcaggccttcattaccaccgaccatgataacaaccagattacggcgtttcatccaggcgcaatgatgcgttcgtacgaaaatcacgttcgtgatgtgccgggtgttaccttgggcctcgtaggtcctgatggacgcgagggcatgatccaaaatgccgaagaatttgctgctggtggcattccgttcatttttgacccaggtcaggcaatgccgctgttcaacggccccgaactgcgcgagtttatcgaacaggcggactatgtggtggtcaacgattacgaaagcaatcttcttcaagaacgtactggctggaacgagcaggacattgtttcacgcgtgcaggcgtatatcaccacgcaaggtcctaaaggagccctggtacatacaccggagaagacctacgatattccgccggcacacgaacgtcgtgtcgttgatccaactggttgcggcgacgcgtttcgcgccggcctgatctatggtattcagcataattatgattggttgaccattggccgcatgggaaacttaatgggtgcgctgaaagtggaacaccctggcacgcaaaatcagcgtttcgattttgccgtgttcaacgaccagttcaaacaacagtttggctacgcgctc

SEQ ID NO: 130 - protein, 321 aa, synthetic construct
  REGION 1..321: note = Variant of adenosine kinase
MHHHHHHGGSGMSALICGSLAYDTIMVFPDQFKNHILPDKVHILNVSFLVPRMRREFGGCAGNIAYNLHLLGGAPIPMGTVGQDFGPYREHFETLGIDLSRVKIIDDLFTPQAFITTDHDNNQITAFHPGAMMRSYENHVRDVPGVTLGLVGPDGREGMIQNAEEFAAGGIPFIFDPGQAMPLFNGPELREFIEQADYVVVNDYESNLLQERTGWNEQDIVSRVQAYITTQGPKGALVHTPEKTYDIPPAHERRVVDPTGCGDAFRAGLIYGIQHNYDWLTIGRMGNLMGALKVEHPGTQNQRFDFAVFNDQFKQQFGYAL

SEQ ID NO: 131 - DNA, 963 bp, synthetic construct
  misc_feature 1..963: note = Variant of adenosine kinase
  source 1..963: mol_type = other DNA
atgcaccatcatcaccatcacgggggctccggcatgagtgcactgatttgcggttctttagcgtatgataccatcatggtgtttccggaccagttcaagaaccatattctgcccgataaagttcacatcctcaatgtcagctttcttgtaccacgcatgcgtcgtgaatttggaggctgtgccggcaacattgcgtacaatctgcatctgttgggtggtgctccgatccctatgggaacggtgggccaagatttcggtccgtatcgcgagcacttcgaaactctgggcattgacttatcccgcgtcaagatcatcagggatctgtttacagctcaggccttcattaccaccgaccatgataacaaccagattacggcgtttcatccaggcgcaatgatgcgttcgtacgaaaatcacgttcgtgatgtgccgggtgttaccttgggcctcgtaggtcctgatggacgcgagggcatgatccaaaatgccgaagaatttgctgctggtggcattccgttcatttttgacccaggtcaggcaatgccgctgttcaacggccccgaactgcgcgagtttatcgaacaggcggactatgtggtggtcaacgattacgaaagcaatcttcttcaagaacgtactggctggaacgagcaggacattgtttcacgcgtgcaggcgtatatcaccacgcaaggtcctaaaggagccctggtacatacaccggagaagacctacgatattccgccggcacacgaacgtcgtgtcgttgatccaactggttgcggcgacgcgtttcgcgccggcctgatctatggtattcagcataattatgattggttgaccattggccgcatgggaaacttaatgggtgcgctgaaagtggaacaccctggcacgcaaaatcagcgtttcgattttgccgaattcaacgaccagttcaaacaacagtttggctacgcgctc

SEQ ID NO: 132 - protein, 321 aa, synthetic construct
  REGION 1..321: note = Variant of adenosine kinase
MHHHHHHGGSGMSALICGSLAYDTIMVFPDQFKNHILPDKVHILNVSFLVPRMRREFGGCAGNIAYNLHLLGGAPIPMGTVGQDFGPYREHFETLGIDLSRVKIIRDLFTAQAFITTDHDNNQITAFHPGAMMRSYENHVRDVPGVTLGLVGPDGREGMIQNAEEFAAGGIPFIFDPGQAMPLFNGPELREFIEQADYVVVNDYESNLLQERTGWNEQDIVSRVQAYITTQGPKGALVHTPEKTYDIPPAHERRVVDPTGCGDAFRAGLIYGIQHNYDWLTIGRMGNLMGALKVEHPGTQNQRFDFAEFNDQFKQQFGYAL

SEQ ID NO: 133 - DNA, 963 bp, synthetic construct
  misc_feature 1..963: note = Variant of adenosine kinase
  source 1..963: mol_type = other DNA
atgcaccatcatcaccatcacgggggctccggcatgagtgcactgatttgcggttctttagcgtatgataccatcatggtgtttccggaccagttcaagaaccatattctgcccgataaagttcacatcctcaatgtcagctttcttgtaccacgcatgcgtcgtgaatttggaggctgtgccggcaacattgcgtacgggctgcatctgttgggtggtgctccgatccctatgggaacggtgggccaagatttcggtccgtatcgcgagcacttcgaaactctgggcattgacttatcccgcgtcaagatcatcgatgatctgtttacaccgcaggccttcattaccaccgaccatgataacaaccagattacggcgtttcatccaggcgcaatgatgcgttcgtacgaaaatcacgttcgtgatgtgccgggtgttaccttgggcctcgtaggtcctgatggacgcgagggcatgatccaaaatgccgaagaatttgctgctggtggcattccgttcatttttgacccaggtcaggcaatgccgctgttcaacggccccgaactgcgcgagtttatcgaacaggcggactatgtggtggtcaacgattacgaaagcaatcttcttcaagaacgtactggctggaacgagcaggacattgtttcacgcgtgcaggcgtatatcaccacgcaaggtcctaaaggagccctggtacatacaccggagaagacctacgatattccgccggcacacgaacgtcgtgtcgttgatccaactggttgcggcgacgcgtttcgcgccggcctgatctatggtattcagcataattatgattggttgaccattggccgcatgggaaacttaatgggtgcgctgaaagtggaacaccctggcacgcaaaatcagcgtttcgattttgccgaattcaacgaccagttcaaacaacagtttggctacgcgctc

SEQ ID NO: 134 - protein, 321 aa, synthetic construct
  REGION 1..321: note = Variant of adenosine kinase
MHHHHHHGGSGMSALICGSLAYDTIMVFPDQFKNHILPDKVHILNVSFLVPRMRREFGGCAGNIAYGLHLLGGAPIPMGTVGQDFGPYREHFETLGIDLSRVKIIDDLFTPQAFITTDHDNNQITAFHPGAMMRSYENHVRDVPGVTLGLVGPDGREGMIQNAEEFAAGGIPFIFDPGQAMPLFNGPELREFIEQADYVVVNDYESNLLQERTGWNEQDIVSRVQAYITTQGPKGALVHTPEKTYDIPPAHERRVVDPTGCGDAFRAGLIYGIQHNYDWLTIGRMGNLMGALKVEHPGTQNQRFDFAEFNDQFKQQFGYAL

SEQ ID NO: 135 - DNA, 963 bp, synthetic construct
  misc_feature 1..963: note = Variant of adenosine kinase
  source 1..963: mol_type = other DNA
atgcaccatcatcaccatcacgggggctccggcatgagtgcactgatttgcggttctttagcgtatgataccatcatggtgtttccggaccagttcaagaaccatattctgcccgataaagttcacatcctcaatgtcagctttcttgtaccacgcatgcgtcgtgaatttggaggctgtgccggcaacattgcgtacaatctgcatctgttgggtggtgctccgatccctatgggaacggtgggccaagatttcggtccgtatcgcgagcacttcgaaactctgggcattgacttatcccgcgtcaagatcatcgatgatctgttcacagcgcaggccttcattaccaccgaccatgatcataaccagattacggcgtttcatccaggggcaatgatgcgttcgtacgaaaatcacgttcgtgatgtgccgggtgttaccttgggcctcgtaggtcctgatggacgcgagggcatgatccaaaatgccgaagaatttgctgctggtggcattccgttcatttttgacccaggtcaggcaatgccgctgttcaacggccccgaactgcgcgagtttatcgaacaggcggactatgtggtggtcaacgattacgaaagcaatcttcttcaagaacgtactggctggaacgagcaggacattgtttcacgcgtgcaggcgtatatcaccacgcaaggttcgaaaggagccctggtacatacaccggagaagacctacgatattccgccggcacacgaacgtcgtgtcgttgatccaactggttgcggcgacgcgtttcgcgccggcctgatctatggtattcagcataattatgattggttgaccattggccgcatgggaaacttaatgggtgcgctgaaagtggaacaccctggcacgcaaaatcagcgtttcgattttgccgaattcaacgaccagttcaaacaaagctttggctacgcgctc

SEQ ID NO: 136 - protein, 321 aa, synthetic construct
  REGION 1..321: note = Variant of adenosine kinase
MHHHHHHGGSGMSALICGSLAYDTIMVFPDQFKNHILPDKVHILNVSFLVPRMRREFGGCAGNIAYNLHLLGGAPIPMGTVGQDFGPYREHFETLGIDLSRVKIIDDLFTAQAFITTDHDHNQITAFHPGAMMRSYENHVRDVPGVTLGLVGPDGREGMIQNAEEFAAGGIPFIFDPGQAMPLFNGPELREFIEQADYVVVNDYESNLLQERTGWNEQDIVSRVQAYITTQGSKGALVHTPEKTYDIPPAHERRVVDPTGCGDAFRAGLIYGIQHNYDWLTIGRMGNLMGALKVEHPGTQNQRFDFAEFNDQFKQSFGYAL

SEQ ID NO: 137 - DNA, 963 bp, synthetic construct
  misc_feature 1..963: note = Variant of adenosine kinase
  source 1..963: mol_type = other DNA
atgcaccatcatcaccatcacgggggctccggcatgagtgcactgatttgcggttctttagcgtatgataccatcatggtgtttccggaccagttcaagaatcatattctgcccgataaagttcacatcctcaatgtcagctttcttgtaccacgcatgcgtcgtgaatttggaggctgtgccggcaacattgcgtacaatctgcatctgttgggtggtgctccgatccctatgggaacggtgggccaagatttcggtccgtatcgcgagcacttcgaaactctgggcattgacttatcccgcgtcaagatcatcgatgatctgtttacagcgcaggccttcattacgaccgaccatgatcataaccagattacggcgtttcatccaggggcaatgatgcgttcgtacgaaaatcacgttcgtgatgtgccgggtgttaccttgggcctcgtaggtcctgatggacgcgagggcatgatccaaaatgccgaagaatttgctgctggtggcattccgttcatttttgacccaggtcaggcactgccgctgttcaacggccccgaactgcgcgagtttatcgaacaggcggactatgtggtggtcaacgattacgaaagcaatctgcttcaaacgcgtactggctggaacgagcaggacattgtttcacgcgtgcaggcgtatatcaccacgcaaggttcgaaaggagccctggtacatacaccggagaagacctacgatattcgtccggcacacgaacgtcgtgtcgttgatccaactggttgcggcgacgcgtttcgcgccggcctgatctatggtattcagcataattatgattggttgaccattggccgcatgggaaacttaatgggtgcgctgaaagtggaacaccctggcacgcaaaatcagcgtttcgattttgccctgttcaacgaccagttcaaacaaagctttggctacgcgctc

SEQ ID NO: 138 - protein, 321 aa, synthetic construct
  REGION 1..321: note = Variant of adenosine kinase
MHHHHHHGGSGMSALICGSLAYDTIMVFPDQFKNHILPDKVHILNVSFLVPRMRREFGGCAGNIAYNLHLLGGAPIPMGTVGQDFGPYREHFETLGIDLSRVKIIDDLFTAQAFITTDHDHNQITAFHPGAMMRSYENHVRDVPGVTLGLVGPDGREGMIQNAEEFAAGGIPFIFDPGQALPLFNGPELREFIEQADYVVVNDYESNLLQTRTGWNEQDIVSRVQAYITTQGSKGALVHTPEKTYDIRPAHERRVVDPTGCGDAFRAGLIYGIQHNYDWLTIGRMGNLMGALKVEHPGTQNQRFDFALFNDQFKQSFGYAL

SEQ ID NO: 139 - DNA, 963 bp, synthetic construct
  misc_feature 1..963: note = Variant of adenosine kinase
  source 1..963: mol_type = other DNA
atgcaccatcatcaccatcacgggggctccggcatgagtgcactgatttgcggttctttagcgtatgataccatcatggtgtttccggaccagttcaagaatcatattctgcccgataaagttcacatcctcaatgtcagctttcttgtaccacgcctgcgccgtgaatttggaggctgtgccggcaacattgcgtacaatctgcatctgttgggtggtgctccgatccctatgggaacggtgggccaagatttcggtccgtatcgcgagcacttcgaaactctgggcattgacttatcccgcgtcaagatcatcgatgatctgtttacagcgcaggccttcattacgaccgaccatgatcataaccagattacggcgtttcatccaggggcaatgatgcgttcgtacgaaaatcacgttcgtgatgtgccgggtgttaccttgggcctcgtaggtcctgatggccgcgagggtatgatccaaaatgccgaagaatttgctgctggtggcattccgttcatttttgacccaggtcaggcactgccgctgttcaacggccccgaactgcgcgagtttatcgaacaggcggactatgtggtggtcaacgattacgaaagcaatctgcttcaaacgcgtactggctggaacgagcaggacattgtttcacgcgtgcaggcgtatatcaccacgcaaggttcgaaaggagccctggtacatacaccggagaagacctacgatattcgtccggcacacgaacgtcgtgtcgttgatccaactggttgcggcgacgcgtttcgcgccggcctgatctatggtattcagcataattatgattggttgaccattggccgcatgggaaacttaatgggtgcgctgaaagtggaacaccctggcacgcaaaatcagcgtttcgattttgccctgttcaacgaccagttcaaacaaagctttggctacgcgctc

SEQ ID NO: 140 - protein, 321 aa, synthetic construct
  REGION 1..321: note = Variant of adenosine kinase
MHHHHHHGGSGMSALICGSLAYDTIMVFPDQFKNHILPDKVHILNVSFLVPRLRREFGGCAGNIAYNLHLLGGAPIPMGTVGQDFGPYREHFETLGIDLSRVKIIDDLFTAQAFITTDHDHNQITAFHPGAMMRSYENHVRDVPGVTLGLVGPDGREGMIQNAEEFAAGGIPFIFDPGQALPLFNGPELREFIEQADYVVVNDYESNLLQTRTGWNEQDIVSRVQAYITTQGSKGALVHTPEKTYDIRPAHERRVVDPTGCGDAFRAGLIYGIQHNYDWLTIGRMGNLMGALKVEHPGTQNQRFDFALFNDQFKQSFGYAL

SEQ ID NO: 141 - DNA, 963 bp, synthetic construct
  misc_feature 1..963: note = Variant of adenosine kinase
  source 1..963: mol_type = other DNA
atgcaccatcatcaccatcacgggggctccggcatgagtgcactgatttgcggttctttagcgtatgataccatcatggtgtttccggaccagttcaagaatcatattctgcccgataaagttcacatcctcaatgtcagctttcttgtaccacgcctgcgccgtgaatttggaggctgtgccggcaacattgcgtacaatctgcatctgttgggtggtgctccgatccctatgggaacggtgggccaagatttcggtccgtatcgcgagcacttcgaaactctgggcattgacttatcccgcgtcaagatcatcgatgatctgtttacagcgcaggccttcattacgaccgaccatgatcataaccagattacggcgtttcatccaggggcaatgatgcgttcgtacgaaaatcacgttcgtgatgtgccgggtgttaccttgggcctcgtaggtcctgatggccgcgagggtatgatccaaaatgccgaagaatttgctgctggtggcattccgttcatttttgacccaggtcaggcactgccgctgttcaacggccccgaactgcgcgagtttatcgaacaggcggactatgtggtggtcaacgattacgaaagcaatctgcttcaaacgcgtactggctggaacgagcaggacattgtttcacgcgtgcaggcgtatatcaccacgcaaggttcgaaaggagccctggtacatacaccggagaagacctacgatattcgtccggcacacgaacgtcgtgtcgttgatccaactggttgcggcgacgcgtttcgcgccggcctgatctatggtattcagcataattatgattggttgaccattggccgcatgggaaacttaatgggtgcgctgaaagtggaacaccctggcacgcaaaatcagcgtttcgattttgccctgttcaacgaccagttcaaacaaagctttggctactcgctc

SEQ ID NO: 142 - protein, 321 aa, synthetic construct
  REGION 1..321: note = Variant of adenosine kinase
MHHHHHHGGSGMSALICGSLAYDTIMVFPDQFKNHILPDKVHILNVSFLVPRLRREFGGCAGNIAYNLHLLGGAPIPMGTVGQDFGPYREHFETLGIDLSRVKIIDDLFTAQAFITTDHDHNQITAFHPGAMMRSYENHVRDVPGVTLGLVGPDGREGMIQNAEEFAAGGIPFIFDPGQALPLFNGPELREFIEQADYVVVNDYESNLLQTRTGWNEQDIVSRVQAYITTQGSKGALVHTPEKTYDIRPAHERRVVDPTGCGDAFRAGLIYGIQHNYDWLTIGRMGNLMGALKVEHPGTQNQRFDFALFNDQFKQSFGYSL

SEQ ID NO: 143 - DNA, 963 bp, synthetic construct
  misc_feature 1..963: note = Variant of adenosine kinase
  source 1..963: mol_type = other DNA
atgcaccatcatcaccatcacgggggctccggcatgagtgcactgatttgcggttctttagcgtatgataccatcatggtgtttccggaccaattcaagaatcatattctgcccgataaagttcacattctcaatgtcagctttcttgtaccacgcctgcgccgtgaatttggaggctgtgccggcaacattgcgtacaatctgcatctgttgggtggtgctccgatccctatgggaacggtgggccaagatttccagccgtatcgcgaacacttcgaaactctgggcattgacttatcccgcgtcaagatcatcgatgatctgtttacagcgcaggccttcattacgaccgaccatgatcataaccagattacggcgtttcatccaggggcaatgatgcgttcgtacgaaaatcacgttcgtgatgtgccgggtgttaccttgggcctcgtaggtcctgatggccgcgagggtatgatccaaaatgccgaagaatttgctgctgcgggcattccgttcatttttgacccaggtcaggcactgccgctgttcaacggccccgaactgcgcgagtttatcgaacaggcggactatgtggtggtcaacgattacgaaagcaatctgcttcaaacgcgtactggctggaacgagcaggacattgtttcacgcgtgcaggcgtatatcaccacgcaaggttcgaaaggagccctggtacatacaccggagaagacctacgatattcgtccggcacacgaacgtcgtgtcgttgatccaactggttgcggcgacgcgtttcgcgccggcctgatctatggtattcagcataattatgattggttgaccattggccgcatgggaaacttaatgggtgcgctgaaagtggaacaccctggcacgcaaaatcagcgtttcgattttgccctgttcaacgaccagttcaaacaaagctttggctactcgctc

SEQ ID NO: 144 - protein, 321 aa, synthetic construct
  REGION 1..321: note = Variant of adenosine kinase
MHHHHHHGGSGMSALICGSLAYDTIMVFPDQFKNHILPDKVHILNVSFLVPRLRREFGGCAGNIAYNLHLLGGAPIPMGTVGQDFQPYREHFETLGIDLSRVKIIDDLFTAQAFITTDHDHNQITAFHPGAMMRSYENHVRDVPGVTLGLVGPDGREGMIQNAEEFAAAGIPFIFDPGQALPLFNGPELREFIEQADYVVVNDYESNLLQTRTGWNEQDIVSRVQAYITTQGSKGALVHTPEKTYDIRPAHERRVVDPTGCGDAFRAGLIYGIQHNYDWLTIGRMGNLMGALKVEHPGTQNQRFDFALFNDQFKQSFGYSL

SEQ ID NO: 145 - DNA, 963 bp, synthetic construct
  misc_feature 1..963: note = Variant of adenosine kinase
  source 1..963: mol_type = other DNA
atgcaccatcatcaccatcacgggggctccggcatgagtgcactgatttgcggttctttagcgtatgataccatcatggtgtttccggaccaattcaagaatcatattctgcccgataaagttcacattctcaatgtcagctttcttgtaccacgcctgcgccgtgaatttggaggctgtgccggcaacattgcgtacaatctgcatctgttgggtggtgcaccgatcgtcatggccacggtgggccaagatttccagccgtatcgcgaacacttcgaaactctgggcattgacttaagtcgcgtcaagatcatcgatgatctgtttacagcgcaggccttcattacgaccgaccatgatcataaccagattacggcgtttcatccaggggcaatgatgcgttcgtacgaaaatcacgttcgtgatgtgccgggtgttaccttgggcctcgtaggtcctgatgggcgcgagggcatgatccaaaatgccgaagaatttgctgcggcggacattccgttcatttttgacccaggtcaggcactgccgctgttcaacggccccgaactgcgcgagtttatcgaacaggcggactatgtggtggtcaacgattacgaaagcaatctgcttcaaacgcgtactggctggaacgagcaggacattgtttcacgcgtgcaggcgtatatcaccacgcaaggttcgcgcggagccctggtacatacaccggagaagacctacgatattcgtccggcacacgaacgtcgtgtcgttgatccaactggttgcggcgacgcgtttcgcgccggcctgatctatggtattcagcataattatgattggttgaccattggccgcatgggaaacttaatgggtgcgctgaaagtggaacaccctggcacgcaaaatcagcgtttcgattttgccctgttcaacgaccagttcaaacaaagctttggctactcgctc

SEQ ID NO: 146 - protein, 321 aa, synthetic construct
  REGION 1..321: note = Variant of adenosine kinase
MHHHHHHGGSGMSALICGSLAYDTIMVFPDQFKNHILPDKVHILNVSFLVPRLRREFGGCAGNIAYNLHLLGGAPIVMATVGQDFQPYREHFETLGIDLSRVKIIDDLFTAQAFITTDHDHNQITAFHPGAMMRSYENHVRDVPGVTLGLVGPDGREGMIQNAEEFAAADIPFIFDPGQALPLFNGPELREFIEQADYVVVNDYESNLLQTRTGWNEQDIVSRVQAYITTQGSRGALVHTPEKTYDIRPAHERRVVDPTGCGDAFRAGLIYGIQHNYDWLTIGRMGNLMGALKVEHPGTQNQRFDFALFNDQFKQSFGYSL

SEQ ID NO: 147 - DNA, 963 bp, synthetic construct
  misc_feature 1..963: note = Variant of adenosine kinase
  source 1..963: mol_type = other DNA
atgcaccatcatcaccatcacgggggctccggcatgagtgcactgatttgcggttctttagcgtatgataccatcatggtgtttccggaccagttcaagaaccatattctgcccgataaagttcacatcctcaatgtcagctttcttgtaccacgcatgcgtcgtgaatttggaggctgtgccggcaacattgcgtacaatctgcatctgttgggtggtgctccgatccctatgggaacggtgggccaagatttcggtccgtatcgcgagcacttcgaaactctgggcattgacttatcccgcgtcaagatcatcgatgatctgttcacagcgcaggccttcattaccaccgaccatgatcataaccagattacggcgtttcatccaggcgcaatgatgcgttcgtacgaaaatcacgttcgtgatgtgccgggtgttaccttgggcctcgtaggtcctgatggacgcgagggcatgatccaaaatgccgaagaatttgctgctggtggcattccgttcatttttgacccaggtcaggcaatgccgctgttcaacggccccgaactgcgcgagtttatcgaacaggcggactatgtggtggtcaacgattacgaaagcaatcttcttcaagaacgtactggctggaacgagcaggacattgtttcacgcgtgcaggcgtatatcaccacgcaaggttcgaaaggagccctggtacatacaccggagaagacctacgatattccgccggcacacgaacgtcgtgtcgttgatccaactggttgcggcgacgcgtttcgcgccggcctgatctatggtattcagcataattatgattggttgaccattggccgcatgggaaacttaatgggtgcgctgaaagtggaacaccctggcacgcaaaatcagcgtttcgattttgccgaattcaacgaccagttcaaacaagaatttggctacgcgctc

SEQ ID NO: 148 - protein, 321 aa, synthetic construct
  REGION 1..321: note = Variant of adenosine kinase
MHHHHHHGGSGMSALICGSLAYDTIMVFPDQFKNHILPDKVHILNVSFLVPRMRREFGGCAGNIAYNLHLLGGAPIPMGTVGQDFGPYREHFETLGIDLSRVKIIDDLFTAQAFITTDHDHNQITAFHPGAMMRSYENHVRDVPGVTLGLVGPDGREGMIQNAEEFAAGGIPFIFDPGQAMPLFNGPELREFIEQADYVVVNDYESNLLQERTGWNEQDIVSRVQAYITTQGSKGALVHTPEKTYDIPPAHERRVVDPTGCGDAFRAGLIYGIQHNYDWLTIGRMGNLMGALKVEHPGTQNQRFDFAEFNDQFKQEFGYAL

SEQ ID NO: 149 - DNA, 963 bp, synthetic construct
  misc_feature 1..963: note = Variant of adenosine kinase
  source 1..963: mol_type = other DNA
atgcaccatcatcaccatcacgggggctccggcatgagtgcactgatttgcggttctttagcgtatgataccatcatggtgtttccggaccagttcaagaaccatattctgcccgataaagttcacatcctcaatgtcagctttcttgtaccacgcatgcgtcgtgaatttggaggctgtgccggcaacattgcgtacaatctgcatctgttgggtggtgctccgatccctatgggaacggtgggccaagatttcggtccgtatcgcgagcacttcgaaactctgggcattgacttatcccgcgtcaagatcatcgatgatctgagtacagcgcaggccttcattaccaccgaccatgatcataaccagattacggcgtttcatccaggcgcaatgatgcgttcgtacgaaaatcacgttcgtgatgtgccgggtgttaccttgggcctcgtaggtcctgatggacgcgagggcatgatccaaaatgccgaagaatttgctgctggtggcattccgttcatttttgacccaggtcaggcactgccgctgttcaacggccccgaactgcgcgagtttatcgaacaggcggactatgtggtggtcaacgattacgaaagcaatcttcttcaagaacgtactggctggaacgagcaggacattgtttcacgcgtgcaggcgtatatcaccacgcaaggttcgaaaggagccctggtacatacaccggagaagacctacgatattccgccggcacacgaacgtcgtgtcgttgatccaactggttgcggcgacgcgtttcgcgccggcctgatctatggtattcagcataattatgattggttgaccattggccgcatgggaaacttaatgggtgcgctgaaagtggaacaccctggcacgcaaaatcagcgtttcgattttgccgaattcaacgaccagttcaaacaacagtttggctacgcgctc

SEQ ID NO: 150 - protein, 321 aa, synthetic construct
  REGION 1..321: note = Variant of adenosine kinase
MHHHHHHGGSGMSALICGSLAYDTIMVFPDQFKNHILPDKVHILNVSFLVPRMRREFGGCAGNIAYNLHLLGGAPIPMGTVGQDFGPYREHFETLGIDLSRVKIIDDLSTAQAFITTDHDHNQITAFHPGAMMRSYENHVRDVPGVTLGLVGPDGREGMIQNAEEFAAGGIPFIFDPGQALPLFNGPELREFIEQADYVVVNDYESNLLQERTGWNEQDIVSRVQAYITTQGSKGALVHTPEKTYDIPPAHERRVVDPTGCGDAFRAGLIYGIQHNYDWLTIGRMGNLMGALKVEHPGTQNQRFDFAEFNDQFKQQFGYAL

SEQ ID NO: 151 - DNA, 963 bp, synthetic construct
  misc_feature 1..963: note = Variant of adenosine kinase
  source 1..963: mol_type = other DNA
atgcaccatcatcaccatcacgggggctccggcatgagtgcactgatttgcggttctttagcgtatgataccatcatggtgtttccggaccagttcaagaaccatattctgcccgataaagttcacatcctcaatgtcagctttcttgtaccacgcatgcgtcgtgaatttggaggctgtgccggcaacattgcgtacaatctgcatctgttgggtggtgctccgatccctatgggaacggtgggccaagatttcggtccgtatcgcgagcacttcgaaactctgggcattgacttatcccgcgtcaagatcatcgatgatctgagtacaccgcaggccttcattaccaccgaccatgatcataaccagattacggcgtttcatccaggcgcaatgatgcgttcgtacgaaaatcacgttcgtgatgtgccgggtgttaccttgggcctcgtaggtcctgatggacgcgagggcatgatccaaaatgccgaagaatttgctgctggtggcattccgttcatttttgacccaggtcaggcactgccgctgttcaacggccccgaactgcgcgagtttatcgaacaggcggactatgtggtggtcaacgattacgaaagcaatcttcttcaagaacgtactggctggaacgagcaggacattgtttcacgcgtgcaggcgtatatcaccacgcaaggtcctaaaggagccctggtacatacaccggagaagacctacgatattccgccggcacacgaacgtcgtgtcgttgatccaactggttgcggcgacgcgtttcgcgccggcctgatctatggtattcagcataattatgattggttgaccattggccgcatgggaaacttaatgggtgcgctgaaagtggaacaccctggcacgcaaaatcagcgtttcgattttgccgaattcaacgaccagttcaaacaacagtttggctacgcgctc

SEQ ID NO: 152 - protein, 321 aa, synthetic construct
  REGION 1..321: note = Variant of adenosine kinase
MHHHHHHGGSGMSALICGSLAYDTIMVFPDQFKNHILPDKVHILNVSFLVPRMRREFGGCAGNIAYNLHLLGGAPIPMGTVGQDFGPYREHFETLGIDLSRVKIIDDLSTPQAFITTDHDHNQITAFHPGAMMRSYENHVRDVPGVTLGLVGPDGREGMIQNAEEFAAGGIPFIFDPGQALPLFNGPELREFIEQADYVVVNDYESNLLQERTGWNEQDIVSRVQAYITTQGPKGALVHTPEKTYDIPPAHERRVVDPTGCGDAFRAGLIYGIQHNYDWLTIGRMGNLMGALKVEHPGTQNQRFDFAEFNDQFKQQFGYAL

SEQ ID NO: 153 - DNA, 963 bp, synthetic construct
  misc_feature 1..963: note = Variant of adenosine kinase
  source 1..963: mol_type = other DNA
atgcaccatcatcaccatcacgggggctccggcatgagtgcactgatttgcggttctttagcgtatgataccatcatggtgtttccggaccagttcaagaaccatattctgcccgataaggttcaccgcctcaatgtcagctttcttgtaccacgcatgcgtcgtgaatttggaggctgtgccggcaacattgcgtacaatctgcatctgttgggtggtgctccgatccctatgggaacggtgggccaagatttcggtccgtatcgcgagcacttcgaaactctgggcattgacttatcccgcgtcaagatcatcgatgatctgttcacagcgcaggccttcattaccaccgaccatgatcataaccagattacggcgtttcatccaggcgcaatgatgcgttcgtacgaaaatcacgttcgtgatgtgccgggtgttaccttgggcctcgtaggtcctgatggacgcgagggcatgatccaaaatgccgaagaatttgctgctggtggcattccgttcatttttgacccaggtcaggcaatgccgctgttcaacggccccgaactgcgcgagtttatcgaacaggcggactatgtggtggtcaacgattacgaaagcaatcttcttcaagaacgtactggctggaacgagcaggacattgtttcacgcgtgcaggcgtatatcaccacgcaaggttcgaaaggagccctggtacatacaccggagaagacctacgatattccgccggcacacgaacgtcgtgtcgttgatccaactggttgcggcgacgcgtttcgcgccggcctgatctatggtattcagcataattatgattggttgaccattggccgcatgggaaacttaatgggtgcgctgaaagtggaacaccctggcacgcaaaatcagcgtttcgattttgccgaattcaacgaccagttcaaacaaagctttggctacgcgctc

SEQ ID NO: 154 - protein, 321 aa, synthetic construct
  REGION 1..321: note = Variant of adenosine kinase
MHHHHHHGGSGMSALICGSLAYDTIMVFPDQFKNHILPDKVHRLNVSFLVPRMRREFGGCAGNIAYNLHLLGGAPIPMGTVGQDFGPYREHFETLGIDLSRVKIIDDLFTAQAFITTDHDHNQITAFHPGAMMRSYENHVRDVPGVTLGLVGPDGREGMIQNAEEFAAGGIPFIFDPGQAMPLFNGPELREFIEQADYVVVNDYESNLLQERTGWNEQDIVSRVQAYITTQGSKGALVHTPEKTYDIPPAHERRVVDPTGCGDAFRAGLIYGIQHNYDWLTIGRMGNLMGALKVEHPGTQNQRFDFAEFNDQFKQSFGYAL

SEQ ID NO: 155 - DNA, 963 bp, synthetic construct
  misc_feature 1..963: note = Variant of adenosine kinase
  source 1..963: mol_type = other DNA
atgcaccatcatcaccatcacgggggctccggcatgagtgcactgatttgcggttctttagcgtatgataccatcatggtgtttccggaccagttcaagaaccatattctgcccgataaagttcacatcctcaatgtcagctttcttgtaccacgcatgcgtcgtgaatttggaggctgtgccggcaacattgcgtacaatctgcatctgttgggtggtgctccgatccctatgggaacggtgggccaagatttcggtccgtatcgcgagcacttcgaaactctgggcattgacttatcccgcgtcaagatcatcgatgatctgttcacagcgcaggccttcattaccaccgaccatgatcataaccagattacggcgtttcatccaggcgcaatgatgcgttcgtacgaaaatcacgttcgtgatgtgccgggtgttaccttgggcctcgtaggtcctgatggacgcgagggcatgatccaaaatgccgaagaatttgctgctggtggcattccgttcatttttgacccaggtcaggcaatgccgctgttcaacggccccgaactgcgcgagtttatcgaacaggcggactatgtggtggtcaacgattacgaaagcaatcttcttcaagaacgtactggctggaacgagcaggacattgtttcacgcgtgcaggcgtatatcaccacgcaaggtcctaaaggagccctggtacatacaccggagaagacctacgatattccgccggcacacgaacgtcgtgtcgttgatccaactggttgcggcgacgcgtttcgcgccggcctgatctatggtattcagcataattatgattggttgaccattggccgcatgggaaacttaatgggtgcgctgaaagtggaacaccctggcacgcaaaatcagcgtttcgattttgccgaattcaacgaccagttcaaacaaagctttggctacgcgctc

SEQ ID NO: 156 - protein, 321 aa, synthetic construct
  REGION 1..321: note = Variant of adenosine kinase
MHHHHHHGGSGMSALICGSLAYDTIMVFPDQFKNHILPDKVHILNVSFLVPRMRREFGGCAGNIAYNLHLLGGAPIPMGTVGQDFGPYREHFETLGIDLSRVKIIDDLFTAQAFITTDHDHNQITAFHPGAMMRSYENHVRDVPGVTLGLVGPDGREGMIQNAEEFAAGGIPFIFDPGQAMPLFNGPELREFIEQADYVVVNDYESNLLQERTGWNEQDIVSRVQAYITTQGPKGALVHTPEKTYDIPPAHERRVVDPTGCGDAFRAGLIYGIQHNYDWLTIGRMGNLMGALKVEHPGTQNQRFDFAEFNDQFKQSFGYAL

SEQ ID NO: 157 - DNA, 963 bp, synthetic construct
  misc_feature 1..963: note = Variant of adenosine kinase
  source 1..963: mol_type = other DNA
atgcaccatcatcaccatcacgggggctccggcatgagtgcactgatttgcggttctttagcgtatgataccatcatggtgtttccggaccagttcaagaaccatattctgcccgataaggttcacatcctcaatgtcagctttcttgtaccacgcatgcgtcgtgaatttggaggctgtgccggcaacattgcgtacaatctgcatctgttgggtggtgctccgatccctatgggaacggtgggccaagatttcggtccgtatcgcgagcacttcgaaactctgggcattgacttatcccgcgtcaagatcatcgatgatctgagtacaccgcaggccttcattaccaccgaccatgatcataaccagattacggcgtttcatccaggggcaatgatgcgttcgtacgaaaatcacgttcgtgatgtgccgggtgttaccttgggcctcgtaggtcctgatggacgcgagggcatgatccaaaatgccgaagaatttgctgctggtggcattccgttcatttttgacccaggtcaggcactgccgctgttcaacggccccgaactgcgcgagtttatcgaacaggcggactatgtggtggtcaacgattacgaaagcaatcttcttcaagaacgtactggctggaacgagcaggacattgtttcacgcgtgcaggcgtatatcaccacgcaaggtccgaaaggagccctggtacatacaccggagaagacctacgatattccgccggcacacgaacgtcgtgtcgttgatccaactggttgcggcgacgcgtttcgcgccggcctgatctatggtattcagcataattatgattggttgaccattggccgcatgggaaacttaatgggtgcgctgaaagtggaacaccctggcacgcaaaatcagcgtttcgattttgccgaattcaacgaccagttcaaacaaagctttggctacgcgctc

SEQ ID NO: 158 - protein, 321 aa, synthetic construct
  REGION 1..321: note = Variant of adenosine kinase
MHHHHHHGGSGMSALICGSLAYDTIMVFPDQFKNHILPDKVHILNVSFLVPRMRREFGGCAGNIAYNLHLLGGAPIPMGTVGQDFGPYREHFETLGIDLSRVKIIDDLSTPQAFITTDHDHNQITAFHPGAMMRSYENHVRDVPGVTLGLVGPDGREGMIQNAEEFAAGGIPFIFDPGQALPLFNGPELREFIEQADYVVVNDYESNLLQERTGWNEQDIVSRVQAYITTQGPKGALVHTPEKTYDIPPAHERRVVDPTGCGDAFRAGLIYGIQHNYDWLTIGRMGNLMGALKVEHPGTQNQRFDFAEFNDQFKQSFGYAL

SEQ ID NO: 159 - DNA, 963 bp, synthetic construct
  misc_feature 1..963: note = Variant of adenosine kinase
  source 1..963: mol_type = other DNA
atgcaccatcatcaccatcacgggggctccggcatgagtgcactgatttgcggttctttagcgtatgataccatcatggtgtttccggaccagttcaagaaccatattctgcccgataaggttcacatcctcaatgtcagctttcttgtaccacgcatgcgtcgtgaatttggaggctgtgccggcaacattgcgtacaatctgcatctgttgggtggtgctccgatccctatgggaacggtgggccaagatttcggtccgtatcgcgagcacttcgaaactctgggcattgacttatcccgcgtcaagatcatcgatgatctgagtacaccgcaggccttcattaccaccgaccatgatcataaccagattacggcgtttcatccaggcgcaatgatgcgttcgtacgaaaatcacgttcgtgatgtgccgggtgttaccttgggcctcgtaggtcctgatggacgcgagggcatgatccaaaatgccgaagaatttgctgctggtggcattccgttcatttttgacccaggtcaggcaatgccgctgttcaacggccccgaactgcgcgagtttatcgaacaggcggactatgtggtggtcaacgattacgaaagcaatcttcttcaagaacgtactggctggaacgagcaggacattgtttcacgcgtgcaggcgtatatcaccacgcaaggtccgaaaggagccctggtacatacaccggagaagacctacgatattccgccggcacacgaacgtcgtgtcgttgatccaactggttgcggcgacgcgtttcgcgccggcctgatctatggtattcagcataattatgattggttgaccattggccgcatgggaaacttaatgggtgcgctgaaagtggaacaccctggcacgcaaaatcagcgtttcgattttgccgaattcaacgaccagttcaaacaagaatttggctacgcgctc

SEQ ID NO: 160 - protein, 321 aa, synthetic construct
  REGION 1..321: note = Variant of adenosine kinase
MHHHHHHGGSGMSALICGSLAYDTIMVFPDQFKNHILPDKVHILNVSFLVPRMRREFGGCAGNIAYNLHLLGGAPIPMGTVGQDFGPYREHFETLGIDLSRVKIIDDLSTPQAFITTDHDHNQITAFHPGAMMRSYENHVRDVPGVTLGLVGPDGREGMIQNAEEFAAGGIPFIFDPGQAMPLFNGPELREFIEQADYVVVNDYESNLLQERTGWNEQDIVSRVQAYITTQGPKGALVHTPEKTYDIPPAHERRVVDPTGCGDAFRAGLIYGIQHNYDWLTIGRMGNLMGALKVEHPGTQNQRFDFAEFNDQFKQEFGYAL

SEQ ID NO: 161 - DNA, 963 bp, synthetic construct
  misc_feature 1..963: note = Variant of adenosine kinase
  source 1..963: mol_type = other DNA
atgcaccatcatcaccatcacgggggctccggcatgagtgcactgatttgcggttctttagcgtatgataccatcatggtgtttccggaccagttcaagaaccatattctgcccgataaggttcaccgcctcaatgtcagctttcttgtaccacgcatgcgtcgtgaatttggaggctgtgccggcaacattgcgtacaatctgcatctgttgggtggtgctccgatccctatgggaacggtgggccaagatttcggtccgtatcgcgagcacttcgaaactctgggcattgacttatcccgcgtcaagatcatcgatgatctgagtacagcgcaggccttcattaccaccgaccatgatcataaccagattacggcgtttcatccaggcgcaatgatgcgttcgtacgaaaatcacgttcgtgatgtgccgggtgttaccttgggcctcgtaggtcctgatggacgcgagggcatgatccaaaatgccgaagaatttgctgctggtggcattccgttcatttttgacccaggtcaggcaatgccgctgttcaacggccccgaactgcgcgagtttatcgaacaggcggactatgtggtggtcaacgattacgaaagcaatcttcttcaagaacgtactggctggaacgagcaggacattgtttcacgcgtgcaggcgtatatcaccacgcaaggttcgaaaggagccctggtacatacaccggagaagacctacgatattccgccggcacacgaacgtcgtgtcgttgatccaactggttgcggcgacgcgtttcgcgccggcctgatctatggtattcagcataattatgattggttgaccattggccgcatgggaaacttaatgggtgcgctgaaagtggaacaccctggcacgcaaaatcagcgtttcgattttgccgaattcaacgaccagttcaaacaagattttggctacgcgctc

SEQ ID NO: 162 - protein, 321 aa, synthetic construct
  REGION 1..321: note = Variant of adenosine kinase
MHHHHHHGGSGMSALICGSLAYDTIMVFPDQFKNHILPDKVHRLNVSFLVPRMRREFGGCAGNIAYNLHLLGGAPIPMGTVGQDFGPYREHFETLGIDLSRVKIIDDLSTAQAFITTDHDHNQITAFHPGAMMRSYENHVRDVPGVTLGLVGPDGREGMIQNAEEFAAGGIPFIFDPGQAMPLFNGPELREFIEQADYVVVNDYESNLLQERTGWNEQDIVSRVQAYITTQGSKGALVHTPEKTYDIPPAHERRVVDPTGCGDAFRAGLIYGIQHNYDWLTIGRMGNLMGALKVEHPGTQNQRFDFAEFNDQFKQDFGYAL

SEQ ID NO: 163 - DNA, 963 bp, synthetic construct
  misc_feature 1..963: note = Variant of adenosine kinase
  source 1..963: mol_type = other DNA
atgcaccatcatcaccatcacgggggctccggcatgagtgcactgatttgcggttctttagcgtatgataccatcatggtgtttccggaccagttcaagaaccatattctgcccgataaggttcacatcctcaatgtcagctttcttgtaccacgcatgcgtcgtgaatttggaggctgtgccggcaacattgcgtacaatctgcatctgttgggtggtgctccgatccctatgggaacggtgggccaagatttcggtccgtatcgcgagcacttcgaaactctgggcattgacttatcccgcgtcaagatcatcgatgatctgttcacagcgcaggccttcattaccaccgaccatgatcataaccagattacggcgtttcatccaggggcaatgatgcgttcgtacgaaaatcacgttcgtgatgtgccgggtgttaccttgggcctcgtaggtcctgatggacgcgagggcatgatccaaaatgccgaagaatttgctgctggtggcattccgttcatttttgacccaggtcaggcaatgccgctgttcaacggccccgaactgcgcgagtttatcgaacaggcggactatgtggtggtcaacgattacgaaagcaatcttcttcaagaacgtactggctggaacgagcaggacattgtttcacgcgtgcaggcgtatatcaccacgcaaggttcgaaaggagccctggtacatacaccggagaagacctacgatattccgccggcacacgaacgtcgtgtcgttgatccaactggttgcggcgacgcgtttcgcgccggcctgatctatggtattcagcataattatgattggttgaccattggccgcatgggaaacttaatgggtgcgctgaaagtggaacaccctggcacgcaaaatcagcgtttcgattttgccgaattcaacgaccagttcaaacaacagtttggctacgcgctc

SEQ ID NO: 164 - protein, 321 aa, synthetic construct
  REGION 1..321: note = Variant of adenosine kinase
MHHHHHHGGSGMSALICGSLAYDTIMVFPDQFKNHILPDKVHILNVSFLVPRMRREFGGCAGNIAYNLHLLGGAPIPMGTVGQDFGPYREHFETLGIDLSRVKIIDDLFTAQAFITTDHDHNQITAFHPGAMMRSYENHVRDVPGVTLGLVGPDGREGMIQNAEEFAAGGIPFIFDPGQAMPLFNGPELREFIEQADYVVVNDYESNLLQERTGWNEQDIVSRVQAYITTQGSKGALVHTPEKTYDIPPAHERRVVDPTGCGDAFRAGLIYGIQHNYDWLTIGRMGNLMGALKVEHPGTQNQRFDFAEFNDQFKQQFGYAL

SEQ ID NO: 165 - DNA, 963 bp, synthetic construct
  misc_feature 1..963: note = Variant of adenosine kinase
  source 1..963: mol_type = other DNA
atgcaccatcatcaccatcacgggggctccggcatgagtgcactgatttgcggttctttagcgtatgataccatcatggtgtttccggaccagttcaagaaccatattctgcccgataaagttcacatcctcaatgtcagctttcttgtaccacgcatgcgtcgtgaatttggaggctgtgccggcaacattgcgtacaatctgcatctgttgggtggtgctccgatccctatgggaacggtgggccaagatttcggtccgtatcgcgagcacttcgaaactctgggcattgacttatcccgcgtcaagatcatcgatgatctgagtacaccgcaggccttcattaccaccgaccatgatcataaccagattacggcgtttcatccaggggcaatgatgcgttcgtacgaaaatcacgttcgtgatgtgccgggtgttaccttgggcctcgtaggtcctgatggacgcgagggcatgatccaaaatgccgaagaatttgctgctggtggcattccgttcatttttgacccaggtcaggcaatgccgctgttcaacggccccgaactgcgcgagtttatcgaacaggcggactatgtggtggtcaacgattacgaaagcaatcttcttcaagaacgtactggctggaacgagcaggacattgtttcacgcgtgcaggcgtatatcaccacgcaaggttcgaaaggagccctggtacatacaccggagaagacctacgatattccgccggcacacgaacgtcgtgtcgttgatccaactggttgcggcgacgcgtttcgcgccggcctgatctatggtattcagcataattatgattggttgaccattggccgcatgggaaacttaatgggtgcgctgaaagtggaacaccctggcacgcaaaatcagcgtttcgattttgccgaattcaacgaccagttcaaacaagaatttggctacgcgctc

SEQ ID NO: 166 - protein, 321 aa, synthetic construct
  REGION 1..321: note = Variant of adenosine kinase
MHHHHHHGGSGMSALICGSLAYDTIMVFPDQFKNHILPDKVHILNVSFLVPRMRREFGGCAGNIAYNLHLLGGAPIPMGTVGQDFGPYREHFETLGIDLSRVKIIDDLSTPQAFITTDHDHNQITAFHPGAMMRSYENHVRDVPGVTLGLVGPDGREGMIQNAEEFAAGGIPFIFDPGQAMPLFNGPELREFIEQADYVVVNDYESNLLQERTGWNEQDIVSRVQAYITTQGSKGALVHTPEKTYDIPPAHERRVVDPTGCGDAFRAGLIYGIQHNYDWLTIGRMGNLMGALKVEHPGTQNQRFDFAEFNDQFKQEFGYAL

SEQ ID NO: 167 - DNA, 963 bp, synthetic construct
  misc_feature 1..963: note = Variant of adenosine kinase
  source 1..963: mol_type = other DNA
atgcaccatcatcaccatcacgggggctccggcatgagtgcactgatttgcggttctttagcgtatgataccatcatggtgtttccggaccagttcaagaaccatattctgtgcgataaagttcacatcctcaatgtcagctttcttgtaccacgcatgcgtcgtgaatttggaggctgtgccggcaacattgcgtacaatctgcatctgttgggtggtgctccgatccctatgggaacggtgggccaagatttcggtccgtatcgcgagcacttcgaaactctgggcattgacttatcccgcgtcaagatcatcgatgatctgtttacaccgcaggccttcattaccaccgaccatgatcataaccagattacggcgtttcatccaggcgcaatgatgcgttcgtacgaaaatcacgttcgtgatgtgccgggtgttaccttgggcctcgtaggtcctgatggacgcgagggcatgatccaaaatgccgaagaatttgctgctggtggcattccgttcatttttgacccaggtcaggcaatgccgctgttcaacggccccgaactgcgcgagtttatcgaacaggcggactatgtggtggtcaacgattacgaaagcaatgtgcttcagacccgtactggctggaacgagcaggacattgtttcacgcgtgcaggcgtatatcaccacgcaaggtcctaaaggagccctggtacatacaccggagaagacctacgatattccgccggcacacgaacgtcgtgtcgttgatccaactggttgcggcgacgcgtttcgcgccggcctgatctatggtattcagcataattatgattggttgaccattggccgcatgggaaacttaatgggtgcgctgaaagtggaacaccctggcacgcaaaatcagcgtttcgattttgccttcttcaacgaccagttcaaacaacagtttggctacgcgctc

SEQ ID NO: 168 - protein, 321 aa, synthetic construct
  REGION 1..321: note = Variant of adenosine kinase
MHHHHHHGGSGMSALICGSLAYDTIMVFPDQFKNHILCDKVHILNVSFLVPRMRREFGGCAGNIAYNLHLLGGAPIPMGTVGQDFGPYREHFETLGIDLSRVKIIDDLFTPQAFITTDHDHNQITAFHPGAMMRSYENHVRDVPGVTLGLVGPDGREGMIQNAEEFAAGGIPFIFDPGQAMPLFNGPELREFIEQADYVVVNDYESNVLQTRTGWNEQDIVSRVQAYITTQGPKGALVHTPEKTYDIPPAHERRVVDPTGCGDAFRAGLIYGIQHNYDWLTIGRMGNLMGALKVEHPGTQNQRFDFAFFNDQFKQQFGYAL

SEQ ID NO: 169 - DNA, 963 bp, synthetic construct
  misc_feature 1..963: note = Variant of adenosine kinase
  source 1..963: mol_type = other DNA
atgcaccatcatcaccatcacgggggctccggcatgagtgcactgatttgcggttctttagcgtatgataccatcatggtgtttccggaccagttcaagaaccatattctgcccgataaagttcacatcctcaatgtcagctttcttgtaccacgcatgcgtcgtgaatttggaggctgtgccggcaacattgcgtacaatctgcatctgttgggtggtgctccgatccctatgggaacggtgggccaagatttcggtccgtatcgcgagcacttcgaaactctgggcattgacttatcccgcgtcaagatcatcgatgatctgttcacagcgcaggccttcattaccaccgaccatgatcataaccagattacggcgtttcatccaggggcaatgatgcgttcgtacgaaaatcacgttcgtgatgtgccgggtgttaccttgggcctcgtaggtcctgatggacgcgagggcatgatccaaaatgccgaagaatttgctgctggtggcattccgttcatttttgacccaggtcaggcactgccgctgttcaacggccccgaactgcgcgagtttatcgaacaggcggactatgtggtggtcaacgattacgaaagcaatcttcttcaagaacgtactggctggaacgagcaggacattgtttcacgcgtgcaggcgtatatcaccacgcaaggttcgaaaggagccctggtacatacaccggagaagacctacgatattccgccggcacacgaacgtcgtgtcgttgatccaactggttgcggcgacgcgtttcgcgccggcctgatctatggtattcagcataattatgattggttgaccattggccgcatgggaaacttaatgggtgcgctgaaagtggaacaccctggcacgcaaaatcagcgtttcgattttgccgaattcaacgaccagttcaaacaaagctttggctacgcgctc

SEQ ID NO: 170 - protein, 321 aa, synthetic construct
  REGION 1..321: note = Variant of adenosine kinase
MHHHHHHGGSGMSALICGSLAYDTIMVFPDQFKNHILPDKVHILNVSFLVPRMRREFGGCAGNIAYNLHLLGGAPIPMGTVGQDFGPYREHFETLGIDLSRVKIIDDLFTAQAFITTDHDHNQITAFHPGAMMRSYENHVRDVPGVTLGLVGPDGREGMIQNAEEFAAGGIPFIFDPGQALPLFNGPELREFIEQADYVVVNDYESNLLQERTGWNEQDIVSRVQAYITTQGSKGALVHTPEKTYDIPPAHERRVVDPTGCGDAFRAGLIYGIQHNYDWLTIGRMGNLMGALKVEHPGTQNQRFDFAEFNDQFKQSFGYAL

SEQ ID NO: 171 - DNA, 963 bp, synthetic construct
  misc_feature 1..963: note = Variant of adenosine kinase
  source 1..963: mol_type = other DNA
atgcaccatcatcaccatcacgggggctccggcatgagtgcactgatttgcggttctttagcgtatgataccatcatggtgtttccggaccagttcaagaaccatattctgcccgataaagttcacatcctcaatgtcagctttcttgtaccacgcatgcgtcgtgaatttggaggctgtgccggcaacattgcgtacaatctgcatctgttgggtggtgctccgatccctatgggaacggtgggccaagatttcggtccgtatcgcgagcacttcgaaactctgggcattgacttatcccgcgtcaagatcatcgatgatctgagtacagcgcaggccttcattaccaccgaccatgatcataaccagattacggcgtttcatccaggcgcaatgatgcgttcgtacgaaaatcacgttcgtgatgtgccgggtgttaccttgggcctcgtaggtcctgatggacgcgagggcatgatccaaaatgccgaagaatttgctgctggtggcattccgttcatttttgacccaggtcaggcaatgccgctgttcaacggccccgaactgcgcgagtttatcgaacaggcggactatgtggtggtcaacgattacgaaagcaatcttcttcaagaacgtactggctggaacgagcaggacattgtttcacgcgtgcaggcgtatatcaccacgcaaggttcgaaaggagccctggtacatacaccggagaagacctacgatattccgccggcacacgaacgtcgtgtcgttgatccaactggttgcggcgacgcgtttcgcgccggcctgatctatggtattcagcataattatgattggttgaccattggccgcatgggaaacttaatgggtgcgctgaaagtggaacaccctggcacgcaaaatcagcgtttcgattttgccgaattcaacgaccagttcaaacaaagctttggctacgcgctc

SEQ ID NO: 172 - protein, 321 aa, synthetic construct
  REGION 1..321: note = Variant of adenosine kinase
MHHHHHHGGSGMSALICGSLAYDTIMVFPDQFKNHILPDKVHILNVSFLVPRMRREFGGCAGNIAYNLHLLGGAPIPMGTVGQDFGPYREHFETLGIDLSRVKIIDDLSTAQAFITTDHDHNQITAFHPGAMMRSYENHVRDVPGVTLGLVGPDGREGMIQNAEEFAAGGIPFIFDPGQAMPLFNGPELREFIEQADYVVVNDYESNLLQERTGWNEQDIVSRVQAYITTQGSKGALVHTPEKTYDIPPAHERRVVDPTGCGDAFRAGLIYGIQHNYDWLTIGRMGNLMGALKVEHPGTQNQRFDFAEFNDQFKQSFGYAL

SEQ ID NO: 173 - DNA, 963 bp, synthetic construct
  misc_feature 1..963: note = Variant of adenosine kinase
  source 1..963: mol_type = other DNA
atgcaccatcatcaccatcacgggggctccggcatgagtgcactgatttgcggttctttagcgtatgataccatcatggtgtttccggaccagttcaagaaccatattctgcccgataaggttcacatcctcaatgtcagctttcttgtaccacgcatgcgtcgtgaatttggaggctgtgccggcaacattgcgtacaatctgcatctgttgggtggtgctccgatccctatgggaacggtgggccaagatttcggtccgtatcgcgagcacttcgaaactctgggcattgacttatcccgcgtcaagatcatcgatgatctgttcacagcgcaggccttcattaccaccgaccatgatcataaccagattacggcgtttcatccaggggcaatgatgcgttcgtacgaaaatcacgttcgtgatgtgccgggtgttaccttgggcctcgtaggtcctgatggacgcgagggcatgatccaaaatgccgaagaatttgctgctggtggcattccgttcatttttgacccaggtcaggcactgccgctgttcaacggccccgaactgcgcgagtttatcgaacaggcggactatgtggtggtcaacgattacgaaagcaatcttcttcaagaacgtactggctggaacgagcaggacattgtttcacgcgtgcaggcgtatatcaccacgcaaggttcgaaaggagccctggtacaaacaccggagaagacctacgatattccgccggcacacgaacgtcgtgtcgttgatccaactggttgcggcgacgcgtttcgcgccggcctgatctatggtattcagcataattatgattggttgaccattggccgcatgggaaacttaatgggtgcgctgaaagtggaacaccctggcacgcaaaatcagcgtttcgattttgccgaattcaacgaccagttcaaacaaagctttggctacgcgctc

SEQ ID NO: 174 - protein, 321 aa, synthetic construct
  REGION 1..321: note = Variant of adenosine kinase
MHHHHHHGGSGMSALICGSLAYDTIMVFPDQFKNHILPDKVHILNVSFLVPRMRREFGGCAGNIAYNLHLLGGAPIPMGTVGQDFGPYREHFETLGIDLSRVKIIDDLFTAQAFITTDHDHNQITAFHPGAMMRSYENHVRDVPGVTLGLVGPDGREGMIQNAEEFAAGGIPFIFDPGQALPLFNGPELREFIEQADYVVVNDYESNLLQERTGWNEQDIVSRVQAYITTQGSKGALVQTPEKTYDIPPAHERRVVDPTGCGDAFRAGLIYGIQHNYDWLTIGRMGNLMGALKVEHPGTQNQRFDFAEFNDQFKQSFGYAL

SEQ ID NO: 175 - DNA, 963 bp, synthetic construct
  misc_feature 1..963: note = Variant of adenosine kinase
  source 1..963: mol_type = other DNA
atgcaccatcatcaccatcacgggggctccggcatgagtgcactgatttgcggttctttagcgtatgataccatcatggtgtttccggaccagttcaagaaccatattctgcccgataaagttcacatcctcaatgtcagctttcttgtaccacgcatgcgtcgtgaatttggaggctgtgccggcaacattgcgtacaatctgcatctgttgggtggtgctccgatccctatgggaacggtgggccaagatttcggtccgtatcgcgagcacttcgaaactctgggcattgacttatcccgcgtcaagatcatcgatgatctgttcacagcgcaggccttcattaccaccgaccatgatcataaccagattacggcgtttcatccaggcgcaatgatgcgttcgtacgaaaatcacgttcgtgatgtgccgggtgttaccttgggcctcgtaggtcctgatggacgcgagggcatgatccaaaatgccgaagaatttgctgctggtggcattccgttcatttttgacccaggtcaggcaatgccgctgttcaacggccccgaactgcgcgagtttatcgaacaggcggactatgtggtggtcaacgattacgaaagcaatcttcttcaagaacgtactggctggaacgagcaggacattgtttcacgcgtgcaggcgtatatcaccacgcaaggttcgaaaggagccctggtacaaacaccggagaagacctacgatattccgccggcacacgaacgtcgtgtcgttgatccaactggttgcggcgacgcgtttcgcgccggcctgatctatggtattcagcataattatgattggttgaccattggccgcatgggaaacttaatgggtgcgctgaaagtggaacaccctggcacgcaaaatcagcgtttcgattttgccgaattcaacgaccagttcaaacaaagctttggctacgcgctc

SEQ ID NO: 176 - protein, 321 aa, synthetic construct
  REGION 1..321: note = Variant of adenosine kinase
MHHHHHHGGSGMSALICGSLAYDTIMVFPDQFKNHILPDKVHILNVSFLVPRMRREFGGCAGNIAYNLHLLGGAPIPMGTVGQDFGPYREHFETLGIDLSRVKIIDDLFTAQAFITTDHDHNQITAFHPGAMMRSYENHVRDVPGVTLGLVGPDGREGMIQNAEEFAAGGIPFIFDPGQAMPLFNGPELREFIEQADYVVVNDYESNLLQERTGWNEQDIVSRVQAYITTQGSKGALVQTPEKTYDIPPAHERRVVDPTGCGDAFRAGLIYGIQHNYDWLTIGRMGNLMGALKVEHPGTQNQRFDFAEFNDQFKQSFGYAL

SEQ ID NO: 177 - DNA, 963 bp, synthetic construct
  misc_feature 1..963: note = Variant of adenosine kinase
  source 1..963: mol_type = other DNA
atgcaccatcatcaccatcacgggggctccggcatgagtgcactgatttgcggttctttagcgtatgataccatcatggtgtttccggaccagttcaagaaccatattctgcccgataaagttcacatcctcaatgtcagctttcttgtaccacgcatgcgtcgtgaatttggaggctgtgccggcaacattgcgtacaatctgcatctgttgggtggtgctccgatccctatgggaacggtgggccaagatttcggtccgtatcgcgagcacttcgaaactctgggcattgacttatcccgcgtcaagatcatcgatgatctgagtacagcgcaggccttcattaccaccgaccatgatcataaccagattacggcgtttcatccaggcgcaatgatgcgttcgtacgaaaatcacgttcgtgatgtgccgggtgttaccttgggcctcgtaggtcctgatggacgcgagggcatgatccaaaatgccgaagaatttgctgctggtggcattccgttcatttttgacccaggtcaggcactgccgctgttcaacggccccgaactgcgcgagtttatcgaacaggcggactatgtggtggtcaacgattacgaaagcaatcttcttcaagaacgtactggctggaacgagcaggacattgtttcacgcgtgcaggcgtatatcaccacgcaaggttcgaaaggagccctggtacatacaccggagaagacctacgatattccgccggcacacgaacgtcgtgtcgttgatccaactggttgcggcgacgcgtttcgcgccggcctgatctatggtattcagcataattatgattggttgaccattggccgcatgggaaacttaatgggtgcgctgaaagtggaacaccctggcacgcaaaatcagcgtttcgattttgccgaattcaacgaccagttcaaacaaagctttggctacgcgctc

SEQ ID NO: 178 - protein, 321 aa, synthetic construct
  REGION 1..321: note = Variant of adenosine kinase
MHHHHHHGGSGMSALICGSLAYDTIMVFPDQFKNHILPDKVHILNVSFLVPRMRREFGGCAGNIAYNLHLLGGAPIPMGTVGQDFGPYREHFETLGIDLSRVKIIDDLSTAQAFITTDHDHNQITAFHPGAMMRSYENHVRDVPGVTLGLVGPDGREGMIQNAEEFAAGGIPFIFDPGQALPLFNGPELREFIEQADYVVVNDYESNLLQERTGWNEQDIVSRVQAYITTQGSKGALVHTPEKTYDIPPAHERRVVDPTGCGDAFRAGLIYGIQHNYDWLTIGRMGNLMGALKVEHPGTQNQRFDFAEFNDQFKQSFGYAL

SEQ ID NO: 179 - DNA, 963 bp, synthetic construct
  misc_feature 1..963: note = Variant of adenosine kinase
  source 1..963: mol_type = other DNA
atgcaccatcatcaccatcacgggggctccggcatgagtgcactgatttgcggttctttagcgtatgataccatcatggtgtttccggaccagttcaagaaccatattctgcccgataaggttcacatcctcaatgtcagctttcttgtaccacgcatgcgtcgtgaatttggaggctgtgccggcaacattgcgtacaatctgcatctgttgggtggtgctccgatccctatgggaacggtgggccaagatttcggtccgtatcgcgagcacttcgaaactctgggcattgacttatcccgcgtcaagatcatcgatgatctgagtacagcgcaggccttcattaccaccgaccatgatcataaccagattacggcgtttcatccaggggcaatgatgcgttcgtacgaaaatcacgttcgtgatgtgccgggtgttaccttgggcctcgtaggtcctgatggacgcgagggcatgatccaaaatgccgaagaatttgctgctggtggcattccgttcatttttgacccaggtcaggcaatgccgctgttcaacggccccgaactgcgcgagtttatcgaacaggcggactatgtggtggtcaacgattacgaaagcaatcttcttcaagaacgtactggctggaacgagcaggacattgtttcacgcgtgcaggcgtatatcaccacgcaaggttcgaaaggagccctggtacatacaccggagaagacctacgatattccgccggcacacgaacgtcgtgtcgttgatccaactggttgcggcgacgcgtttcgcgccggcctgatctatggtattcagcataattatgattggttgaccattggccgcatgggaaacttaatgggtgcgctgaaagtggaacaccctggcacgcaaaatcagcgtttcgattttgccgaattcaacgaccagttcaaacaacagtttggctacgcgctc

SEQ ID NO: 180 - protein, 321 aa, synthetic construct
  REGION 1..321: note = Variant of adenosine kinase
MHHHHHHGGSGMSALICGSLAYDTIMVFPDQFKNHILPDKVHILNVSFLVPRMRREFGGCAGNIAYNLHLLGGAPIPMGTVGQDFGPYREHFETLGIDLSRVKIIDDLSTAQAFITTDHDHNQITAFHPGAMMRSYENHVRDVPGVTLGLVGPDGREGMIQNAEEFAAGGIPFIFDPGQAMPLFNGPELREFIEQADYVVVNDYESNLLQERTGWNEQDIVSRVQAYITTQGSKGALVHTPEKTYDIPPAHERRVVDPTGCGDAFRAGLIYGIQHNYDWLTIGRMGNLMGALKVEHPGTQNQRFDFAEFNDQFKQQFGYAL

SEQ ID NO: 181 - DNA, 963 bp, synthetic construct
  misc_feature 1..963: note = Variant of adenosine kinase
  source 1..963: mol_type = other DNA
atgcaccatcatcaccatcacgggggctccggcatgagtgcactgatttgcggttctttagcgtatgataccatcatggtgtttccggaccagttcaagaaccatattctgcccgataaggttcacatcctcaatgtcagctttcttgtaccacgcatgcgtcgtgaatttggaggctgtgccggcaacattgcgtacaatctgcatctgttgggtggtgctccgatccctatgggaacggtgggccaagatttcggtccgtatcgcgagcacttcgaaactctgggcattgacttatcccgcgtcaagatcatcgatgatctgttcacagcgcaggccttcattaccaccgaccatgatcataaccagattacggcgtttcatccaggcgcaatgatgcgttcgtacgaaaatcacgttcgtgatgtgccgggtgttaccttgggcctcgtaggtcctgatggacgcgagggcatgatccaaaatgccgaagaatttgctgctggtggcattccgttcatttttgacccaggtcaggcactgccgctgttcaacggccccgaactgcgcgagtttatcgaacaggcggactatgtggtggtcaacgattacgaaagcaatcttcttcaagaacgtactggctggaacgagcaggacattgtttcacgcgtgcaggcgtatatcaccacgcaaggtccgaaaggagccctggtacatacaccggagaagacctacgatattccgccggcacacgaacgtcgtgtcgttgatccaactggttgcggcgacgcgtttcgcgccggcctgatctatggtattcagcataattatgattggttgaccattggccgcatgggaaacttaatgggtgcgctgaaagtggaacaccctggcacgcaaaatcagcgtttcgattttgccgaattcaacgaccagttcaaacaagaatttggctacgcgctc

SEQ ID NO: 182 - protein, 321 aa, synthetic construct
  REGION 1..321: note = Variant of adenosine kinase
MHHHHHHGGSGMSALICGSLAYDTIMVFPDQFKNHILPDKVHILNVSFLVPRMRREFGGCAGNIAYNLHLLGGAPIPMGTVGQDFGPYREHFETLGIDLSRVKIIDDLFTAQAFITTDHDHNQITAFHPGAMMRSYENHVRDVPGVTLGLVGPDGREGMIQNAEEFAAGGIPFIFDPGQALPLFNGPELREFIEQADYVVVNDYESNLLQERTGWNEQDIVSRVQAYITTQGPKGALVHTPEKTYDIPPAHERRVVDPTGCGDAFRAGLIYGIQHNYDWLTIGRMGNLMGALKVEHPGTQNQRFDFAEFNDQFKQEFGYAL

SEQ ID NO: 183 - DNA, 963 bp, synthetic construct
  misc_feature 1..963: note = Variant of adenosine kinase
  source 1..963: mol_type = other DNA
atgcaccatcatcaccatcacgggggctccggcatgagtgcactgatttgcggttctttagcgtatgataccatcatggtgtttccggaccagttcaagaaccatattctgcccgatcgtgttcacatcctcaatgtcagctttcttgtaccacgcatgcgtcgtgaatttggaggctgtgccggcaacattgcgtacaatctgcatctgttgggtggtgctccgatccctatgggaacggtgggccaagatttcggtccgtatcgcgagcacttcgaaactctgggcattgacttatcccgcgtcaagatcatcgatgatctgagtacaccgcaggccttcattaccaccgaccatgatcataaccagattacggcgtttcatccaggcgcaatgatgcgttcgtacgaaaatcacgttcgtgatgtgccgggtgttaccttgggcctcgtaggtcctgatggacgcgagggcatgatccaaaatgccgaagaatttgctgctggtggcattccgttcatttttgacccaggtcaggcactgccgctgttcaacggccccgaactgcgcgagtttatcgaacaggcggactatgtggtggtcaacgattacgaaagcaatcttcttcaagaacgtactggctggaacgagcaggacattgtttcacgcgtgcaggcgtatatcaccacgcaaggtcctaaaggagccctggtacatacaccggagaagacctacgatattccgccggcacacgaacgtcgtgtcgttgatccaactggttgcggcgacgcgtttcgcgccggcctgatctatggtattcagcataattatgattggttgaccattggccgcatgggaaacttaatgggtgcgctgaaagtggaacaccctggcacgcaaaatcagcgtttcgattttgccgaattcaacgaccagttcaaacaaagctttggctacgcgctc

SEQ ID NO: 184 - protein, 321 aa, synthetic construct
  REGION 1..321: note = Variant of adenosine kinase
MHHHHHHGGSGMSALICGSLAYDTIMVFPDQFKNHILPDRVHILNVSFLVPRMRREFGGCAGNIAYNLHLLGGAPIPMGTVGQDFGPYREHFETLGIDLSRVKIIDDLSTPQAFITTDHDHNQITAFHPGAMMRSYENHVRDVPGVTLGLVGPDGREGMIQNAEEFAAGGIPFIFDPGQALPLFNGPELREFIEQADYVVVNDYESNLLQERTGWNEQDIVSRVQAYITTQGPKGALVHTPEKTYDIPPAHERRVVDPTGCGDAFRAGLIYGIQHNYDWLTIGRMGNLMGALKVEHPGTQNQRFDFAEFNDQFKQSFGYAL

SEQ ID NO: 185 - DNA, 963 bp, synthetic construct
  misc_feature 1..963: note = Variant of adenosine kinase
  source 1..963: mol_type = other DNA
atgcaccatcatcaccatcacgggggctccggcatgagtgcactgatttgcggttctttagcgtatgataccatcatggtgtttccggaccagttcaagaaccatattctgcccgataaggttcaccgcctcaatgtcagctttcttgtaccacgcatgcgtcgtgaatttggaggctgtgccggcaacattgcgtacaatctgcatctgttgggtggtgctccgatccctatgggaacggtgggccaagatttcggtccgtatcgcgagcacttcgaaactctgggcattgacttatcccgcgtcaagatcatcgatgatctgttcacaccgcaggccttcattaccaccgaccatgatcataaccagattacggcgtttcatccaggcgcaatgatgcgttcgtacgaaaatcacgttcgtgatgtgccgggtgttaccttgggcctcgtaggtcctgatggacgcgagggcatgatccaaaatgccgaagaatttgctgctggtggcattccgttcatttttgacccaggtcaggcaatgccgctgttcaacggccccgaactgcgcgagtttatcgaacaggcggactatgtggtggtcaacgattacgaaagcaatcttcttcaagaacgtactggctggaacgagcaggacattgtttcacgcgtgcaggcgtatatcaccacgcaaggttcgaaaggagccctggtacatacaccggagaagacctacgatattccgccggcacacgaacgtcgtgtcgttgatccaactggttgcggcgacgcgtttcgcgccggcctgatctatggtattcagcataattatgattggttgaccattggccgcatgggaaacttaatgggtgcgctgaaagtggaacaccctggcacgcaaaatcagcgtttcgattttgccgaattcaacgaccagttcaaacaacagtttggctacgcgctc

SEQ ID NO: 186 - protein, 321 aa, synthetic construct
  REGION 1..321: note = Variant of adenosine kinase
MHHHHHHGGSGMSALICGSLAYDTIMVFPDQFKNHILPDKVHRLNVSFLVPRMRREFGGCAGNIAYNLHLLGGAPIPMGTVGQDFGPYREHFETLGIDLSRVKIIDDLFTPQAFITTDHDHNQITAFHPGAMMRSYENHVRDVPGVTLGLVGPDGREGMIQNAEEFAAGGIPFIFDPGQAMPLFNGPELREFIEQADYVVVNDYESNLLQERTGWNEQDIVSRVQAYITTQGSKGALVHTPEKTYDIPPAHERRVVDPTGCGDAFRAGLIYGIQHNYDWLTIGRMGNLMGALKVEHPGTQNQRFDFAEFNDQFKQQFGYAL

SEQ ID NO: 187 - DNA, 963 bp, synthetic construct
  misc_feature 1..963: note = Variant of adenosine kinase
  source 1..963: mol_type = other DNA
atgcaccatcatcaccatcacgggggctccggcatgagtgcactgatttgcggttctttagcgtatgataccatcatggtgtttccggaccagttcaagaaccatattctgcccgataaggttcacatcctcaatgtcagctttcttgtaccacgcatgcgtcgtgaatttggaggctgtgccggcaacattgcgtacaatctgcatctgttgggtggtgctccgatccctatgggaacggtgggccaagatttcggtccgtatcgcgagcacttcgaaactctgggcattgacttatcccgcgtcaagatcatcgatgatctgagtacagcgcaggccttcattaccaccgaccatgatcataaccagattacggcgtttcatccaggcgcaatgatgcgttcgtacgaaaatcacgttcgtgatgtgccgggtgttaccttgggcctcgtaggtcctgatggacgcgagggcatgatccaaaatgccgaagaatttgctgctggtggcattccgttcatttttgacccaggtcaggcaatgccgctgttcaacggccccgaactgcgcgagtttatcgaacaggcggactatgtggtggtcaacgattacgaaagcaatcttcttcaagaacgtactggctggaacgagcaggacattgtttcacgcgtgcaggcgtatatcaccacgcaaggtcctaaaggagccctggtacatacaccggagaagacctacgatattccgccggcacacgaacgtcgtgtcgttgatccaactggttgcggcgacgcgtttcgcgccggcctgatctatggtattcagcataattatgattggttgaccattggccgcatgggaaacttaatgggtgcgctgaaagtggaacaccctggcacgcaaaatcagcgtttcgattttgccgaattcaacgaccagttcaaacaaagctttggctacgcgctc

SEQ ID NO: 188 - protein, 321 aa, synthetic construct
  REGION 1..321: note = Variant of adenosine kinase
MHHHHHHGGSGMSALICGSLAYDTIMVFPDQFKNHILPDKVHILNVSFLVPRMRREFGGCAGNIAYNLHLLGGAPIPMGTVGQDFGPYREHFETLGIDLSRVKIIDDLSTAQAFITTDHDHNQITAFHPGAMMRSYENHVRDVPGVTLGLVGPDGREGMIQNAEEFAAGGIPFIFDPGQAMPLFNGPELREFIEQADYVVVNDYESNLLQERTGWNEQDIVSRVQAYITTQGPKGALVHTPEKTYDIPPAHERRVVDPTGCGDAFRAGLIYGIQHNYDWLTIGRMGNLMGALKVEHPGTQNQRFDFAEFNDQFKQSFGYAL

SEQ ID NO: 189 - DNA, 963 bp, synthetic construct
  misc_feature 1..963: note = Variant of adenosine kinase
  source 1..963: mol_type = other DNA
atgcaccatcatcaccatcacgggggctccggcatgagtgcactgatttgcggttctttagcgtatgataccatcatggtgtttccggaccagttcaagaaccatattctgcccgataaggttcacatcctcaatgtcagctttcttgtaccacgcatgcgtcgtgaatttggaggctgtgccggcaacattgcgtacaatctgcatctgttgggtggtgctccgatccctatgggaacggtgggccaagatttcggtccgtatcgcgagcacttcgaaactctgggcattgacttatcccgcgtcaagatcatcgatgatctgagtacagcgcaggccttcattaccaccgaccatgatcataaccagattacggcgtttcatccaggggcaatgatgcgttcgtacgaaaatcacgttcgtgatgtgccgggtgttaccttgggcctcgtaggtcctgatggacgcgagggcatgatccaaaatgccgaagaatttgctgctggtggcattccgttcatttttgacccaggtcaggcaatgccgctgttcaacggccccgaactgcgcgagtttatcgaacaggcggactatgtggtggtcaacgattacgaaagcaatcttcttcaagaacgtactggctggaacgagcaggacattgtttcacgcgtgcaggcgtatatcaccacgcaaggttcgaaaggagccctggtacaaacaccggagaagacctacgatattccgccggcacacgaacgtcgtgtcgttgatccaactggttgcggcgacgcgtttcgcgccggcctgatctatggtattcagcataattatgattggttgaccattggccgcatgggaaacttaatgggtgcgctgaaagtggaacaccctggcacgcaaaatcagcgtttcgattttgccgaattcaacgaccagttcaaacaacagtttggctacgcgctc

SEQ ID NO: 190 - protein, 321 aa, synthetic construct
  REGION 1..321: note = Variant of adenosine kinase
MHHHHHHGGSGMSALICGSLAYDTIMVFPDQFKNHILPDKVHILNVSFLVPRMRREFGGCAGNIAYNLHLLGGAPIPMGTVGQDFGPYREHFETLGIDLSRVKIIDDLSTAQAFITTDHDHNQITAFHPGAMMRSYENHVRDVPGVTLGLVGPDGREGMIQNAEEFAAGGIPFIFDPGQAMPLFNGPELREFIEQADYVVVNDYESNLLQERTGWNEQDIVSRVQAYITTQGSKGALVQTPEKTYDIPPAHERRVVDPTGCGDAFRAGLIYGIQHNYDWLTIGRMGNLMGALKVEHPGTQNQRFDFAEFNDQFKQQFGYAL

SEQ ID NO: 191 - DNA, 963 bp, synthetic construct
  misc_feature 1..963: note = Variant of adenosine kinase
  source 1..963: mol_type = other DNA
atgcaccatcatcaccatcacgggggctccggcatgagtgcactgatttgcggttctttagcgtatgataccatcatggtgtttccggaccagttcaagaaccatattctgcccgataaggttcaccgcctcaatgtcagctttcttgtaccacgcatgcgtcgtgaatttggaggctgtgccggcaacattgcgtacaatctgcatctgttgggtggtgctccgatccctatgggaacggtgggccaagatttcggtccgtatcgcgagcacttcgaaactctgggcattgacttatcccgcgtcaagatcatcgatgatctgttcacaccgcaggccttcattaccaccgaccatgatcataaccagattacggcgtttcatccaggcgcaatgatgcgttcgtacgaaaatcacgttcgtgatgtgccgggtgttaccttgggcctcgtaggtcctgatggacgcgagggcatgatccaaaatgccgaagaatttgctgctggtggcattccgttcatttttgacccaggtcaggcaatgccgctgttcaacggccccgaactgcgcgagtttatcgaacaggcggactatgtggtggtcaacgattacgaaagcaatcttcttcaagaacgtactggctggaacgagcaggacattgtttcacgcgtgcaggcgtatatcaccacgcaaggtcctaaaggagccctggtacatacaccggagaagacctacgatattccgccggcacacgaacgtcgtgtcgttgatccaactggttgcggcgacgcgtttcgcgccggcctgatctatggtattcagcataattatgattggttgaccattggccgcatgggaaacttaatgggtgcgctgaaagtggaacaccctggcacgcaaaatcagcgtttcgattttgccgaattcaacgaccagttcaaacaacagtttggctacgcgctc

SEQ ID NO: 192 - protein, 321 aa, synthetic construct
  REGION 1..321: note = Variant of adenosine kinase
MHHHHHHGGSGMSALICGSLAYDTIMVFPDQFKNHILPDKVHRLNVSFLVPRMRREFGGCAGNIAYNLHLLGGAPIPMGTVGQDFGPYREHFETLGIDLSRVKIIDDLFTPQAFITTDHDHNQITAFHPGAMMRSYENHVRDVPGVTLGLVGPDGREGMIQNAEEFAAGGIPFIFDPGQAMPLFNGPELREFIEQADYVVVNDYESNLLQERTGWNEQDIVSRVQAYITTQGPKGALVHTPEKTYDIPPAHERRVVDPTGCGDAFRAGLIYGIQHNYDWLTIGRMGNLMGALKVEHPGTQNQRFDFAEFNDQFKQQFGYAL

SEQ ID NO: 193 - DNA, 963 bp, synthetic construct
  misc_feature 1..963: note = Variant of adenosine kinase
  source 1..963: mol_type = other DNA
atgcaccatcatcaccatcacgggggctccggcatgagtgcactgatttgcggttctttagcgtatgataccatcatggtgtttccggaccagttcaagaaccatattctgcccgataaggttcacatcctcaatgtcagctttcttgtaccacgcatgcgtcgtgaatttggaggctgtgccggcaacattgcgtacaatctgcatctgttgggtggtgctccgatccctatgggaacggtgggccaagatttcggtccgtatcgcgagcacttcgaaactctgggcattgacttatcccgcgtcaagatcatcgatgatctgtttacaccgcaggccttcattaccaccgaccatgatcataaccagattacggcgtttcatccaggggcaatgatgcgttcgtacgaaaatcacgttcgtgatgtgccgggtgttaccttgggcctcgtaggtcctgatggacgcgagggcatgatccaaaatgccgaagaatttgctgctggtggcattccgttcatttttgacccaggtcaggcactgccgctgttcaacggccccgaactgcgcgagtttatcgaacaggcggactatgtggtggtcaacgattacgaaagcaatcttcttcaagaacgtactggctggaacgagcaggacattgtttcacgcgtgcaggcgtatatcaccacgcaaggttcgaaaggagccctggtacatacaccggagaagacctacgatattccgccggcacacgaacgtcgtgtcgttgatccaactggttgcggcgacgcgtttcgcgccggcctgatctatggtattcagcataattatgattggttgaccattggccgcatgggaaacttaatgggtgcgctgaaagtggaacaccctggcacgcaaaatcagcgtttcgattttgccgaattcaacgaccagttcaaacaacagtttggctacgcgctc

SEQ ID NO: 194 - protein, 321 aa, synthetic construct
  REGION 1..321: note = Variant of adenosine kinase
MHHHHHHGGSGMSALICGSLAYDTIMVFPDQFKNHILPDKVHILNVSFLVPRMRREFGGCAGNIAYNLHLLGGAPIPMGTVGQDFGPYREHFETLGIDLSRVKIIDDLFTPQAFITTDHDHNQITAFHPGAMMRSYENHVRDVPGVTLGLVGPDGREGMIQNAEEFAAGGIPFIFDPGQALPLFNGPELREFIEQADYVVVNDYESNLLQERTGWNEQDIVSRVQAYITTQGSKGALVHTPEKTYDIPPAHERRVVDPTGCGDAFRAGLIYGIQHNYDWLTIGRMGNLMGALKVEHPGTQNQRFDFAEFNDQFKQQFGYAL

SEQ ID NO: 195 - DNA, 963 bp, synthetic construct
  misc_feature 1..963: note = Variant of adenosine kinase
  source 1..963: mol_type = other DNA
atgcaccatcatcaccatcacgggggctccggcatgagtgcactgatttgcggttctttagcgtatgataccatcatggtgtttccggaccagttcaagaaacatattctgcctgataaagttcacatcctcaatgtcagctttcttgtaccacgcatgcgtcgtgaatttggaggctgtgccggcaacattgcgtacaatctgcatctgttgggtggtgctccgatccctatgggaacggtgggccaagatttcggtccgtatcgcgagcacttcgaaactctgggcattgacttatcccgcgtcaagatcatcgatgatctgtttacaccgcaggccttcattaccaccgaccatgatcataaccagattacggcgtttcatccaggcgcaatgatgcgttcgtacgaaaatcacgttcgtgatgtgccgggtgttaccttgggcctcgtaggtcctgatggacgcgagggcatgatccaaaatgccgaagaatttgctgctggtggcattccgttcatttttgacccaggtcaggcaatgccgctgttcaacggccccgaactgcgcgagtttatcgaacaggcggactatgtggtggtcaacgattacgaaagcaatctgcttcagacccgtactggctggaacgagcaggacattgtttcacgcgtgcaggcgtatatcaccacgcaaggtcctaaaggagccctggtacatacaccggagaagacctacgatattcgtggtgcacacgaacgtcgtgtcgttgatccaactggttgcggcgacgcgtttcgcgccggcctgatctatggtattcagcataattatgattggttgaccattggccgcatgggaaacttaatgggtgcgctgaaagtggaacaccctggcacgcaaaatcagcgtttcgattttgccgaattcaacgaccagttcaaacaacagtttggctacgcgctc

SEQ ID NO: 196 - protein, 321 aa, synthetic construct
  REGION 1..321: note = Variant of adenosine kinase
MHHHHHHGGSGMSALICGSLAYDTIMVFPDQFKKHILPDKVHILNVSFLVPRMRREFGGCAGNIAYNLHLLGGAPIPMGTVGQDFGPYREHFETLGIDLSRVKIIDDLFTPQAFITTDHDHNQITAFHPGAMMRSYENHVRDVPGVTLGLVGPDGREGMIQNAEEFAAGGIPFIFDPGQAMPLFNGPELREFIEQADYVVVNDYESNLLQTRTGWNEQDIVSRVQAYITTQGPKGALVHTPEKTYDIRGAHERRVVDPTGCGDAFRAGLIYGIQHNYDWLTIGRMGNLMGALKVEHPGTQNQRFDFAEFNDQFKQQFGYAL

SEQ ID NO: 197 - DNA, 963 bp, synthetic construct
  misc_feature 1..963: note = Variant of adenosine kinase
  source 1..963: mol_type = other DNA
atgcaccatcatcaccatcacgggggctccggcatgagtgcactgatttgcggttctttagcgtatgataccatcatggtgtttccggaccagttcaagaaacatattctgtgcgataaagttcacatcctcaatgtcagctttcttgtaccacgcatgcgtcgtgaatttggaggctgtgccggcaacattgcgtacaatctgcatctgttgggtggtgctccgatccctatgggaacggtgggccaagatttcggtccgtatcgcgagcacttcgaaactctgggcattgacttatcccgcgtcaagatcatcgatgatctgtttacaccgcaggccttcattaccaccgaccatgatcataaccagattacggcgtttcatccaggcgcaatgatgcgttcgtacgaaaatcacgttcgtgatgtgccgggtgttaccttgggcctcgtaggtcctgatggacgcgagggcatgatccaaaatgccgaagaatttgctgctggtggcattccgttcatttttgacccaggtcaggcaatgccgctgttcaacggccccgaactgcgcgagtttatcgaacaggcggactatgtggtggtcaacgattacgaaagcaatcttcttcaagaacgtactggctggaacgagcaggacattgtttcacgcgtgcaggcgtatatcaccacgcaaggtcctaaaggagccctggtacatacaccggagaagacctacgatattcgtggtgcacacgaacgtcgtgtcgttgatccaactggttgcggcgacgcgtttcgcgccggcctgatctatggtattcagcataattatgattggttgaccattggccgcatgggaaacttaatgggtgcgctgaaagtggaacaccctggcacgcaaaatcagcgtttcgattttgccgagttcaacgaccagttcaaacaacagtttggctacgcgctc

SEQ ID NO: 198 - protein, 321 aa, synthetic construct
  REGION 1..321: note = Variant of adenosine kinase
MHHHHHHGGSGMSALICGSLAYDTIMVFPDQFKKHILCDKVHILNVSFLVPRMRREFGGCAGNIAYNLHLLGGAPIPMGTVGQDFGPYREHFETLGIDLSRVKIIDDLFTPQAFITTDHDHNQITAFHPGAMMRSYENHVRDVPGVTLGLVGPDGREGMIQNAEEFAAGGIPFIFDPGQAMPLFNGPELREFIEQADYVVVNDYESNLLQERTGWNEQDIVSRVQAYITTQGPKGALVHTPEKTYDIRGAHERRVVDPTGCGDAFRAGLIYGIQHNYDWLTIGRMGNLMGALKVEHPGTQNQRFDFAEFNDQFKQQFGYAL

SEQ ID NO: 199 - DNA, 963 bp, synthetic construct
  misc_feature 1..963: note = Variant of adenosine kinase
  source 1..963: mol_type = other DNA
atgcaccatcatcaccatcacgggggctccggcatgagtgcactgatttgcggttctttagcgtatgataccatcatggtgtttccggaccagttcaagaaccatattctgtgcgataaagttcacatcctcaatgtcagctttcttgtaccacgcatgcgtcgtgaatttggaggctgtgccggcaacattgcgtacaatctgcatctgttgggtggtgctccgatccctatgggaacggtgggccaagatttcggtccgtatcgcgagcacttcgaaactctgggcattgacttatcccgcgtccgtatcatcgatgatctgtttacaccgcaggccttcattatgaccgaccatgatcataaccagattacggcgtttcatccaggcgcaatgatgcgttcgtacgaaaatcacgttcgtgatgtgccgggtgttaccttgggcctcgtaggtcctgatggacgcgagggcatgatccaaaatgccgaagaatttgctgctggtggcattccgttcatttttgacccaggtcaggcaatgccgctgttcaacggccccgaactgcgcgagtttatcgaacaggcggactatgtggtggtcaacgattacgaaagcaatcttcttcaagaacgtactggctggaacgagcaggacattgtttcacgcgtgcaggcgtatatcaccacgcaaggtcctaaaggagccctggtacatacaccggagaagacctacgatattcctccggcacacgaacctcgtgtcgttgatccaactggttgcggcgacgcgtttcgcgccggcctgatctatggtattcagcataattatgattggttgaccattggccgcatgggaaacttaatgggtgcgctgaaagtggaacaccctggcacgcaaaatcagcgtttcgattttgccttcttcaacgaccagttcaaacaacagtttggctacgcgctc

SEQ ID NO: 200 - protein, 321 aa, synthetic construct
  REGION 1..321: note = Variant of adenosine kinase
MHHHHHHGGSGMSALICGSLAYDTIMVFPDQFKNHILCDKVHILNVSFLVPRMRREFGGCAGNIAYNLHLLGGAPIPMGTVGQDFGPYREHFETLGIDLSRVRIIDDLFTPQAFIMTDHDHNQITAFHPGAMMRSYENHVRDVPGVTLGLVGPDGREGMIQNAEEFAAGGIPFIFDPGQAMPLFNGPELREFIEQADYVVVNDYESNLLQERTGWNEQDIVSRVQAYITTQGPKGALVHTPEKTYDIPPAHEPRVVDPTGCGDAFRAGLIYGIQHNYDWLTIGRMGNLMGALKVEHPGTQNQRFDFAFFNDQFKQQFGYAL

SEQ ID NO: 201 - DNA, 963 bp, synthetic construct
  misc_feature 1..963: note = Variant of adenosine kinase
  source 1..963: mol_type = other DNA
atgcaccatcatcaccatcacgggggctccggcatgagtgcactgatttgcggttctttagcgtatgataccatcatggtgtttccggaccagttcaagaaccatattctgcccgataaggttcacatcctcaatgtcagctttcttgtaccacgcatgcgtcgtgaatttggaggctgtgccggcaacattgcgtacaatctgcatctgttgggtggtgctccgatccctatgggaacggtgggccaagatttcggtccgtatcgcgagcacttcgaaactctgggcattgacttatcccgcgtcaagatcatcgatgatctgttcacaccgcaggccttcattaccaccgaccatgatcataaccagattacggcgtttcatccaggcgcaatgatgcgttcgtacgaaaatcacgttcgtgatgtgccgggtgttaccttgggcctcgtaggtcctgatggacgcgagggcatgatccaaaatgccgaagaatttgctgctggtggcattccgttcatttttgacccaggtcaggcaatgccgctgttcaacggccccgaactgcgcgagtttatcgaacaggcggactatgtggtggtcaacgattacgaaagcaatcttcttcaagaacgtactggctggaacgagcaggacattgtttcacgcgtgcaggcgtatatcaccacgcaaggtccgaaaggagccctggtacatacaccggagaagacctacgatattccgccggcacacgaacgtcgtgtcgttgatccaactggttgcggcgacgcgtttcgcgccggcctgatctatggtattcagcataattatgattggttgaccattggccgcatgggaaacttaatgggtgcgctgaaagtggaacaccctggcacgcaaaatcagcgtttcgattttgccgaattcaacgaccagttcaaacaagaatttggctacgcgctc

SEQ ID NO: 202 - protein, 321 aa, synthetic construct
  REGION 1..321: note = Variant of adenosine kinase
MHHHHHHGGSGMSALICGSLAYDTIMVFPDQFKNHILPDKVHILNVSFLVPRMRREFGGCAGNIAYNLHLLGGAPIPMGTVGQDFGPYREHFETLGIDLSRVKIIDDLFTPQAFITTDHDHNQITAFHPGAMMRSYENHVRDVPGVTLGLVGPDGREGMIQNAEEFAAGGIPFIFDPGQAMPLFNGPELREFIEQADYVVVNDYESNLLQERTGWNEQDIVSRVQAYITTQGPKGALVHTPEKTYDIPPAHERRVVDPTGCGDAFRAGLIYGIQHNYDWLTIGRMGNLMGALKVEHPGTQNQRFDFAEFNDQFKQEFGYAL

SEQ ID NO: 203 - DNA, 963 bp, synthetic construct
  misc_feature 1..963: note = Variant of adenosine kinase
  source 1..963: mol_type = other DNA
atgcaccatcatcaccatcacgggggctccggcatgagtgcactgatttgcggttctttagcgtatgataccatcatggtgtttccggaccagttcaagaaacatattctgcctgataaagttcacatcctcaatgtcagctttcttgtaccacgcatgcgtcgtgaatttggaggctgtgccggcaacattgcgtacaatctgcatctgttgggtggtgctccgatccctatgggaacggtgggccaagatttcggtccgtatcgcgagcacttcgaaactctgggcattgacttatcccgcgtcaagatcatcgatgatctgtttacaccgcaggccttcattaccaccgaccatgatcataaccagattacggcgtttcatccaggcgcaatgatgcgttcgtacgaaaatcacgttcgtgatgtgccgggtgttaccttgggcctcgtaggtcctgatggacgcgagggcatgatccaaaatgccgaagaatttgctgctggtggcattccgttcatttttgacccaggtcaggcaatgccgctgttcaacggccccgaactgcgcgagtttatcgaacaggcggactatgtggtggtcaacgattacgaaagcaatcttcttcaagaacgtactggctggaacgagcaggacattgtttcacgcgtgcaggcgtatatcaccacgcaaggtcctaaaggagccctggtacatacaccggagaagacctacgatattccgccggcacacgaacgtcgtgtcgttgatccaactggttgcggcgacgcgtttcgcgccggcctgatctatggtattcagcataattatgattggttgaccattggccgcatgggaaacttaatgggtgcgctgaaagtggaacaccctggcacgcaaaatcagcgtttcgattttgccttcttcaacgaccagttcaaacaacagtttggctacgcgctc

SEQ ID NO: 204 - protein, 321 aa, synthetic construct
  REGION 1..321: note = Variant of adenosine kinase
MHHHHHHGGSGMSALICGSLAYDTIMVFPDQFKKHILPDKVHILNVSFLVPRMRREFGGCAGNIAYNLHLLGGAPIPMGTVGQDFGPYREHFETLGIDLSRVKIIDDLFTPQAFITTDHDHNQITAFHPGAMMRSYENHVRDVPGVTLGLVGPDGREGMIQNAEEFAAGGIPFIFDPGQAMPLFNGPELREFIEQADYVVVNDYESNLLQERTGWNEQDIVSRVQAYITTQGPKGALVHTPEKTYDIPPAHERRVVDPTGCGDAFRAGLIYGIQHNYDWLTIGRMGNLMGALKVEHPGTQNQRFDFAFFNDQFKQQFGYAL

SEQ ID NO: 205 - DNA, 963 bp, synthetic construct
  misc_feature 1..963: note = Variant of adenosine kinase
  source 1..963: mol_type = other DNA
atgcaccatcatcaccatcacgggggctccggcatgagtgcactgatttgcggttctttagcgtatgataccatcatggtgtttccggaccagttcaagaaccatattctgcccgataaagttcacatcctcaatgtcagctttcttgtaccacgcatgcgtcgtgaatttggaggctgtgccggcaacattgcgtacaatctgcatctgttgggtggtgctccgatccctatgggaacggtgggccaagatttcggtccgtatcgcgagcacttcgaaactctgggcattgacttatcccgcgtcaagatcatcgatgatctgtttacaccgcaggccttcattaccaccgaccatgatcataaccagattacggcgtttcatccaggcgcaatgatgcgttcgtacgaaaatcacgttcgtgatgtgccgggtgttaccttgggcctcgtaggtcctgatggacgcgagggcatgatccaaaatgccgaagaatttgctgctggtggcattccgttcatttttgacccaggtcaggcaatgccgctgttcaacggccccgaactgcgcgagtttatcgaacaggcggactatgtggtggtcaacgattacgaaagcaatcttcttcaagaacgtactggctggaacgagcaggacattgtttcacgcgtgcaggcgtatatcaccacgcaaggttcgaaaggagccctggtacatacaccggagaagacctacgatattccgccggcacacgaacgtcgtgtcgttgatccaactggttgcggcgacgcgtttcgcgccggcctgatctatggtattcagcataattatgattggttgaccattggccgcatgggaaacttaatgggtgcgctgaaagtggaacaccctggcacgcaaaatcagcgtttcgattttgccgaattcaacgaccagttcaaacaagaatttggctacgcgctc

SEQ ID NO: 206 - protein, 321 aa, synthetic construct
  REGION 1..321: note = Variant of adenosine kinase
MHHHHHHGGSGMSALICGSLAYDTIMVFPDQFKNHILPDKVHILNVSFLVPRMRREFGGCAGNIAYNLHLLGGAPIPMGTVGQDFGPYREHFETLGIDLSRVKIIDDLFTPQAFITTDHDHNQITAFHPGAMMRSYENHVRDVPGVTLGLVGPDGREGMIQNAEEFAAGGIPFIFDPGQAMPLFNGPELREFIEQADYVVVNDYESNLLQERTGWNEQDIVSRVQAYITTQGSKGALVHTPEKTYDIPPAHERRVVDPTGCGDAFRAGLIYGIQHNYDWLTIGRMGNLMGALKVEHPGTQNQRFDFAEFNDQFKQEFGYAL

SEQ ID NO: 207 - DNA, 963 bp, synthetic construct
  misc_feature 1..963: note = Variant of adenosine kinase
  source 1..963: mol_type = other DNA
atgcaccatcatcaccatcacgggggctccggcatgagtgcactgatttgcggttctttagcgtatgataccatcatggtgtttccggaccagttcaagaaccatattctgcccgatcgtgttcaccgcctcaatgtcagctttcttgtaccacgcatgcgtcgtgaatttggaggctgtgccggcaacattgcgtacaatctgcatctgttgggtggtgctccgatccctatgggaacggtgggccaagatttcggtccgtatcgcgagcacttcgaaactctgggcattgacttatcccgcgtcaagatcatcgatgatctgagtacagcgcaggccttcattaccaccgaccatgatcataaccagattacggcgtttcatccaggcgcaatgatgcgttcgtacgaaaatcacgttcgtgatgtgccgggtgttaccttgggcctcgtaggtcctgatggacgcgagggcatgatccaaaatgccgaagaatttgctgctggtggcattccgttcatttttgacccaggtcaggcaatgccgctgttcaacggccccgaactgcgcgagtttatcgaacaggcggactatgtggtggtcaacgattacgaaagcaatcttcttcaagaacgtactggctggaacgagcaggacattgtttcacgcgtgcaggcgtatatcaccacgcaaggttcgaaaggagccctggtacatacaccggagaagacctacgatattccgccggcacacgaacgtcgtgtcgttgatccaactggttgcggcgacgcgtttcgcgccggcctgatctatggtattcagcataattatgattggttgaccattggccgcatgggaaacttaatgggtgcgctgaaagtggaacaccctggcacgcaaaatcagcgtttcgattttgccgaattcaacgaccagttcaaacaagaatttggctacgcgctc

SEQ ID NO: 208 - protein, 321 aa, synthetic construct
  REGION 1..321: note = Variant of adenosine kinase
MHHHHHHGGSGMSALICGSLAYDTIMVFPDQFKNHILPDRVHRLNVSFLVPRMRREFGGCAGNIAYNLHLLGGAPIPMGTVGQDFGPYREHFETLGIDLSRVKIIDDLSTAQAFITTDHDHNQITAFHPGAMMRSYENHVRDVPGVTLGLVGPDGREGMIQNAEEFAAGGIPFIFDPGQAMPLFNGPELREFIEQADYVVVNDYESNLLQERTGWNEQDIVSRVQAYITTQGSKGALVHTPEKTYDIPPAHERRVVDPTGCGDAFRAGLIYGIQHNYDWLTIGRMGNLMGALKVEHPGTQNQRFDFAEFNDQFKQEFGYAL

SEQ ID NO: 209 - DNA, 963 bp, synthetic construct
  misc_feature 1..963: note = Variant of adenosine kinase
  source 1..963: mol_type = other DNA
atgcaccatcatcaccatcacgggggctccggcatgagtgcactgatttgcggttctttagcgtatgataccatcatggtgtttccggaccagttcaagaaccatattctgcccgataaggttcaccgcctcaatgtcagctttcttgtaccacgcatgcgtcgtgaatttggaggctgtgccggcaacattgcgtacaatctgcatctgttgggtggtgctccgatccctatgggaacggtgggccaagatttcggtccgtatcgcgagcacttcgaaactctgggcattgacttatcccgcgtcaagatcatcgatgatctgtttacaccgcaggccttcattaccaccgaccatgatcataaccagattacggcgtttcatccaggcgcaatgatgcgttcgtacgaaaatcacgttcgtgatgtgccgggtgttaccttgggcctcgtaggtcctgatggacgcgagggcatgatccaaaatgccgaagaatttgctgctggtggcattccgttcatttttgacccaggtcaggcaatgccgctgttcaacggccccgaactgcgcgagtttatcgaacaggcggactatgtggtggtcaacgattacgaaagcaatcttcttcaagaacgtactggctggaacgagcaggacattgtttcacgcgtgcaggcgtatatcaccacgcaaggttcgaaaggagccctggtacatacaccggagaagacctacgatattccgccggcacacgaacgtcgtgtcgttgatccaactggttgcggcgacgcgtttcgcgccggcctgatctatggtattcagcataattatgattggttgaccattggccgcatgggaaacttaatgggtgcgctgaaagtggaacaccctggcacgcaaaatcagcgtttcgattttgccgaattcaacgaccagttcaaacaagattttggctacgcgctc

SEQ ID NO: 210 - protein, 321 aa, synthetic construct
  REGION 1..321: note = Variant of adenosine kinase
MHHHHHHGGSGMSALICGSLAYDTIMVFPDQFKNHILPDKVHRLNVSFLVPRMRREFGGCAGNIAYNLHLLGGAPIPMGTVGQDFGPYREHFETLGIDLSRVKIIDDLFTPQAFITTDHDHNQITAFHPGAMMRSYENHVRDVPGVTLGLVGPDGREGMIQNAEEFAAGGIPFIFDPGQAMPLFNGPELREFIEQADYVVVNDYESNLLQERTGWNEQDIVSRVQAYITTQGSKGALVHTPEKTYDIPPAHERRVVDPTGCGDAFRAGLIYGIQHNYDWLTIGRMGNLMGALKVEHPGTQNQRFDFAEFNDQFKQDFGYAL

SEQ ID NO: 211 - DNA, 963 bp, synthetic construct
  misc_feature 1..963: note = Variant of adenosine kinase
  source 1..963: mol_type = other DNA
atgcaccatcatcaccatcacgggggctccggcatgagtgcactgatttgcggttctttagcgtatgataccatcatggtgtttccggaccagttcaagaaccatattctgcccgatcgtgttcacatcctcaatgtcagctttcttgtaccacgcatgcgtcgtgaatttggaggctgtgccggcaacattgcgtacaatctgcatctgttgggtggtgctccgatccctatgggaacggtgggccaagatttcggtccgtatcgcgagcacttcgaaactctgggcattgacttatcccgcgtcaagatcatcgatgatctgagtacagcgcaggccttcattaccaccgaccatgatcataaccagattacggcgtttcatccaggggcaatgatgcgttcgtacgaaaatcacgttcgtgatgtgccgggtgttaccttgggcctcgtaggtcctgatggacgcgagggcatgatccaaaatgccgaagaatttgctgctggtggcattccgttcatttttgacccaggtcaggcaatgccgctgttcaacggccccgaactgcgcgagtttatcgaacaggcggactatgtggtggtcaacgattacgaaagcaatcttcttcaagaacgtactggctggaacgagcaggacattgtttcacgcgtgcaggcgtatatcaccacgcaaggtccgaaaggagccctggtacatacaccggagaagacctacgatattccgccggcacacgaacgtcgtgtcgttgatccaactggttgcggcgacgcgtttcgcgccggcctgatctatggtattcagcataattatgattggttgaccattggccgcatgggaaacttaatgggtgcgctgaaagtggaacaccctggcacgcaaaatcagcgtttcgattttgccgaattcaacgaccagttcaaacaacagtttggctacgcgctc

SEQ ID NO: 212 - protein, 321 aa, synthetic construct
  REGION 1..321: note = Variant of adenosine kinase
MHHHHHHGGSGMSALICGSLAYDTIMVFPDQFKNHILPDRVHILNVSFLVPRMRREFGGCAGNIAYNLHLLGGAPIPMGTVGQDFGPYREHFETLGIDLSRVKIIDDLSTAQAFITTDHDHNQITAFHPGAMMRSYENHVRDVPGVTLGLVGPDGREGMIQNAEEFAAGGIPFIFDPGQAMPLFNGPELREFIEQADYVVVNDYESNLLQERTGWNEQDIVSRVQAYITTQGPKGALVHTPEKTYDIPPAHERRVVDPTGCGDAFRAGLIYGIQHNYDWLTIGRMGNLMGALKVEHPGTQNQRFDFAEFNDQFKQQFGYAL

SEQ ID NO: 213 - DNA, 963 bp, synthetic construct
  misc_feature 1..963: note = Variant of adenosine kinase
  source 1..963: mol_type = other DNA
atgcaccatcatcaccatcacgggggctccggcatgagtgcactgatttgcggttctttagcgtatgataccatcatggtgtttccggaccagttcaagaaacatattctgtgcgataaagttcacatcctcaatgtcagctttcttgtaccacgcatgcgtcgtgaatttggaggctgtgccggcaacattgcgtacaatctgcatctgttgggtggtgctccgatccctatgggaacggtgggccaagatttcggtccgtatcgcgagcacttcgaaactctgggcattgacttatcccgcgtccgtatcatcgatgatctgtttacaccgcaggccttcattaccaccgaccatgatcataaccagattacggcgtttcatccaggcgcaatgatgcgttcgtacgaaaatcacgttcgtgatgtgccgggtgttaccttgggcctcgtaggtcctgatggacgcgagggcatgatccaaaatgccgaagaatttgctgctggtggcattccgttcatttttgacccaggtcaggcaatgccgctgttcaacggccccgaactgcgcgagtttatcgaacaggcggactatgtggtggtcaacgattacgaaagcaatctgcttcaggaacgtactggctggaacgagcaggacattgtttcacgcgtgcaggcgtatatcaccacgcaaggtcctaaaggagccctggtacatacaccggagaagacctacgatattccgccggcacacgaacgtcgtgtcgttgatccaactggttgcggcgacgcgtttcgcgccggcctgatctatggtattcagcataattatgattggttgaccattggccgcatgggaaacttaatgggtgcgctgaaagtggaacaccctggcacgcaaaatcagcgtttcgattttgccgagttcaacgaccagttcaaacaacagtttggctacgcgctc

SEQ ID NO: 214 - protein, 321 aa, synthetic construct
  REGION 1..321: note = Variant of adenosine kinase
MHHHHHHGGSGMSALICGSLAYDTIMVFPDQFKKHILCDKVHILNVSFLVPRMRREFGGCAGNIAYNLHLLGGAPIPMGTVGQDFGPYREHFETLGIDLSRVRIIDDLFTPQAFITTDHDHNQITAFHPGAMMRSYENHVRDVPGVTLGLVGPDGREGMIQNAEEFAAGGIPFIFDPGQAMPLFNGPELREFIEQADYVVVNDYESNLLQERTGWNEQDIVSRVQAYITTQGPKGALVHTPEKTYDIPPAHERRVVDPTGCGDAFRAGLIYGIQHNYDWLTIGRMGNLMGALKVEHPGTQNQRFDFAEFNDQFKQQFGYAL

SEQ ID NO: 215 - DNA, 963 bp, synthetic construct
  misc_feature 1..963: note = Variant of adenosine kinase
  source 1..963: mol_type = other DNA
atgcaccatcatcaccatcacgggggctccggcatgagtgcactgatttgcggttctttagcgtatgataccatcatggtgtttccggaccagttcaagaaccatattctgcccgataaagttcacatcctcaatgtcagctttcttgtaccacgcatgcgtcgtgaatttggaggctgtgccggcaacattgcgtacaatctgcatctgttgggtggtgctccgatccctatgggaacggtgggccaagatttcggtccgtatcgcgagcacttcgaaactctgggcattgacttatcccgcgtcaagatcatcgatgatctgtttacaccgcaggccttcattaccaccgaccatgatcataaccagattacggcgtttcatccagcggcaatgatgcgttcgtacgaaaatcacgttcgtgatgtgccgggtgttaccttgggcctcgtaggtcctgatggacgcgagggcatgatccaaaatgccgaagaatttgctgctggtggcattccgttcatttttgacccaggtcaggcaatgccgctgttcaacggccccgaactgcgcgagtttatcgaacaggcggactatgtggtggtcaacgattacgaaagcaatcttcttcaagaacgtactggctggaacgagcaggacattgtttcacgcgtgcaggcgtatatcaccacgcaaggtccgaaaggagccctggtacatacaccggagaagacctacgatattccgccggcacacgaacgtcgtgtcgttgatccaactggttgcggcgacgcgtttcgcgccggcctgatctatggtattcagcataattatgattggttgaccattggccgcatgggaaacttaatgggtgcgctgaaagtggaacaccctggcacgcaaaatcagcgtttcgattttgccgaattcaacgaccagttcaaacaagaatttggctacgcgctc

SEQ ID NO: 216 - protein, 321 aa, synthetic construct
  REGION 1..321: note = Variant of adenosine kinase
MHHHHHHGGSGMSALICGSLAYDTIMVFPDQFKNHILPDKVHILNVSFLVPRMRREFGGCAGNIAYNLHLLGGAPIPMGTVGQDFGPYREHFETLGIDLSRVKIIDDLFTPQAFITTDHDHNQITAFHPAAMMRSYENHVRDVPGVTLGLVGPDGREGMIQNAEEFAAGGIPFIFDPGQAMPLFNGPELREFIEQADYVVVNDYESNLLQERTGWNEQDIVSRVQAYITTQGPKGALVHTPEKTYDIPPAHERRVVDPTGCGDAFRAGLIYGIQHNYDWLTIGRMGNLMGALKVEHPGTQNQRFDFAEFNDQFKQEFGYAL

SEQ ID NO: 217 - DNA, 963 bp, synthetic construct
  misc_feature 1..963: note = Variant of adenosine kinase
  source 1..963: mol_type = other DNA
atgcaccatcatcaccatcacgggggctccggcatgagtgcactgatttgcggttctttagcgtatgataccatcatggtgtttccggaccagttcaagcgtcatattctgtgcgataaagttcacatcctcaatgtcagctttcttgtaccacgcatgcgtcgtgaatttggaggctgtgccggcaacattgcgtacaatctgcatctgttgggtggtgctccgatccctatgggaacggtgggccaagatttcggtccgtatcgcgagcacttcgaaactctgggcattgacttatcccgcgtccgtatcatcgatgatctgtttacaccgcaggccttcattaccaccgaccatgatcataaccagattacggcgtttcatccaggcgcaatgatgcgttcgtacgaaaatcacgttcgtgatgtgccgggtgttaccttgggcctcgtaggtcctgatggacgcgagggcatgatccaaaatgccgaagaatttgctgctggtggcattccgttcatttttgacccaggtcaggcaatgccgctgttcaacggccccgaactgcgcgagtttatcgaacaggcggactatgtggtggtcaacgattacgaaagcaatgtgcttcaggaacgtactggctggaacgagcaggacattgtttcacgcgtgcaggcgtatatcaccacgcaaggtcctaaaggagccctggtacatacaccggagaagacctacgatattccgccggcacacgaacgtcgtgtcgttgatccaactggttgcggcgacgcgtttcgcgccggcctgatctatggtattcagcataattatgattggttgaccattggccgcatgggaaacttaatgggtgcgctgaaagtggaacaccctggcacgcaaaatcagcgtttcgattttgccttcttcaacgaccagttcaaacaacagtttggctacgcgctc

SEQ ID NO: 218 - protein, 321 aa, synthetic construct
  REGION 1..321: note = Variant of adenosine kinase
MHHHHHHGGSGMSALICGSLAYDTIMVFPDQFKRHILCDKVHILNVSFLVPRMRREFGGCAGNIAYNLHLLGGAPIPMGTVGQDFGPYREHFETLGIDLSRVRIIDDLFTPQAFITTDHDHNQITAFHPGAMMRSYENHVRDVPGVTLGLVGPDGREGMIQNAEEFAAGGIPFIFDPGQAMPLFNGPELREFIEQADYVVVNDYESNVLQERTGWNEQDIVSRVQAYITTQGPKGALVHTPEKTYDIPPAHERRVVDPTGCGDAFRAGLIYGIQHNYDWLTIGRMGNLMGALKVEHPGTQNQRFDFAFFNDQFKQQFGYAL

SEQ ID NO: 219 - DNA, 963 bp, synthetic construct
  misc_feature 1..963: note = Variant of adenosine kinase
  source 1..963: mol_type = other DNA
atgcaccatcatcaccatcacgggggctccggcatgagtgcactgatttgcggttctttagcgtatgataccatcatggtgtttccggaccagttcaagaaccatattctgcccgataaagttcacatcctcaatgtcagctttcttgtaccacgcatgcgtcgtgaatttggaggctgtgccggcaacattgcgtacaatctgcatctgttgggtggtgctccgatccctatgggaacggtgggccaagatttcggtccgtatcgcgagcacttcgaaactctgggcattgacttatcccgcgtcaagatcatcgatgatctgtttacaccgcaggccttcattaccaccgaccatgatcataaccagattacggcgtttcatccaggcgcaatgatgcgttcgtacgaaaatcacgttcgtgatgtgccgggtgttaccttgggcctcgtaggtcctgatggacgcgagggcatgatccaaaatgccgaagaatttgctgctggtggcattccgttcatttttgacccaggtcaggcactgccgctgttcaacggccccgaactgcgcgagtttatcgaacaggcggactatgtggtggtcaacgattacgaaagcaatcttcttcaagaacgtactggctggaacgagcaggacattgtttcacgcgtgcaggcgtatatcaccacgcaaggtccgaaaggagccctggtacatacaccggagaagacctacgatattccgccggcacacgaacgtcgtgtcgttgatccaactggttgcggcgacgcgtttcgcgccggcctgatctatggtattcagcataattatgattggttgaccattggccgcatgggaaacttaatgggtgcgctgaaagtggaacaccctggcacgcaaaatcagcgtttcgattttgccgaattcaacgaccagttcaaacaaagctttggctacgcgctc

SEQ ID NO: 220 - protein, 321 aa, synthetic construct
  REGION 1..321: note = Variant of adenosine kinase
MHHHHHHGGSGMSALICGSLAYDTIMVFPDQFKNHILPDKVHILNVSFLVPRMRREFGGCAGNIAYNLHLLGGAPIPMGTVGQDFGPYREHFETLGIDLSRVKIIDDLFTPQAFITTDHDHNQITAFHPGAMMRSYENHVRDVPGVTLGLVGPDGREGMIQNAEEFAAGGIPFIFDPGQALPLFNGPELREFIEQADYVVVNDYESNLLQERTGWNEQDIVSRVQAYITTQGPKGALVHTPEKTYDIPPAHERRVVDPTGCGDAFRAGLIYGIQHNYDWLTIGRMGNLMGALKVEHPGTQNQRFDFAEFNDQFKQSFGYAL

SEQ ID NO: 221 - DNA, 963 bp, synthetic construct
  misc_feature 1..963: note = Variant of adenosine kinase
  source 1..963: mol_type = other DNA
atgcaccatcatcaccatcacgggggctccggcatgagtgcactgatttgcggttctttagcgtatgataccatcatggtgtttccggaccagttcaagaaccatattctgcccgataaagttcacatcctcaatgtcagctttcttgtaccacgcatgcgtcgtgaatttggaggctgtgccggcaacattgcgtacaatctgcatctgttgggtggtgctccgatccctatgggaacggtgggccaagatttcggtccgtatcgcgagcacttcgaaactctgggcattgacttatcccgcgtcaagatcatcgatgatctgagtacagcgcaggccttcattaccaccgaccatgatcataaccagattacggcgtttcatccaggcgcaatgatgcgttcgtacgaaaatcacgttcgtgatgtgccgggtgttaccttgggcctcgtaggtcctgatggacgcgagggcatgatccaaaatgccgaagaatttgctgctggtggcattccgttcatttttgacccaggtcaggcaatgccgctgttcaacggccccgaactgcgcgagtttatcgaacaggcggactatgtggtggtcaacgattacgaaagcaatcttcttcaagaacgtactggctggaacgagcaggacattgtttcacgcgtgcaggcgtatatcaccacgcaaggtccgaaaggagccctggtacatacaccggagaagacctacgatattccgccggcacacgaacgtcgtgtcgttgatccaactggttgcggcgacgcgtttcgcgccggcctgatctatggtattcagcataattatgattggttgaccattggccgcatgggaaacttaatgggtgcgctgaaagtggaacaccctggcacgcaaaatcagcgtttcgattttgccgaattcaacgaccagttcaaacaacagtttggctacgcgctc

SEQ ID NO: 222 - protein, 321 aa, synthetic construct
  REGION 1..321: note = Variant of adenosine kinase
MHHHHHHGGSGMSALICGSLAYDTIMVFPDQFKNHILPDKVHILNVSFLVPRMRREFGGCAGNIAYNLHLLGGAPIPMGTVGQDFGPYREHFETLGIDLSRVKIIDDLSTAQAFITTDHDHNQITAFHPGAMMRSYENHVRDVPGVTLGLVGPDGREGMIQNAEEFAAGGIPFIFDPGQAMPLFNGPELREFIEQADYVVVNDYESNLLQERTGWNEQDIVSRVQAYITTQGPKGALVHTPEKTYDIPPAHERRVVDPTGCGDAFRAGLIYGIQHNYDWLTIGRMGNLMGALKVEHPGTQNQRFDFAEFNDQFKQQFGYAL

SEQ ID NO: 223 - DNA, 963 bp, synthetic construct
  misc_feature 1..963: note = Variant of adenosine kinase
  source 1..963: mol_type = other DNA
atgcaccatcatcaccatcacgggggctccggcatgagtgcactgatttgcggttctttagcgtatgataccatcatggtgtttccggaccagttcaagaaccatattctgcccgatcgtgttcacatcctcaatgtcagctttcttgtaccacgcatgcgtcgtgaatttggaggctgtgccggcaacattgcgtacaatctgcatctgttgggtggtgctccgatccctatgggaacggtgggccaagatttcggtccgtatcgcgagcacttcgaaactctgggcattgacttatcccgcgtcaagatcatcgatgatctgttcacaccgcaggccttcattaccaccgaccatgatcataaccagattacggcgtttcatccaggcgcaatgatgcgttcgtacgaaaatcacgttcgtgatgtgccgggtgttaccttgggcctcgtaggtcctgatggacgcgagggcatgatccaaaatgccgaagaatttgctgctggtggcattccgttcatttttgacccaggtcaggcaatgccgctgttcaacggccccgaactgcgcgagtttatcgaacaggcggactatgtggtggtcaacgattacgaaagcaatcttcttcaagaacgtactggctggaacgagcaggacattgtttcacgcgtgcaggcgtatatcaccacgcaaggtcctaaaggagccctggtacatacaccggagaagacctacgatattccgccggcacacgaacgtcgtgtcgttgatccaactggttgcggcgacgcgtttcgcgccggcctgatctatggtattcagcataattatgattggttgaccattggccgcatgggaaacttaatgggtgcgctgaaagtggaacaccctggcacgcaaaatcagcgtttcgattttgccgaattcaacgaccagttcaaacaagattttggctacgcgctc

SEQ ID NO: 224 - protein, 321 aa, synthetic construct
  REGION 1..321: note = Variant of adenosine kinase
MHHHHHHGGSGMSALICGSLAYDTIMVFPDQFKNHILPDRVHILNVSFLVPRMRREFGGCAGNIAYNLHLLGGAPIPMGTVGQDFGPYREHFETLGIDLSRVKIIDDLFTPQAFITTDHDHNQITAFHPGAMMRSYENHVRDVPGVTLGLVGPDGREGMIQNAEEFAAGGIPFIFDPGQAMPLFNGPELREFIEQADYVVVNDYESNLLQERTGWNEQDIVSRVQAYITTQGPKGALVHTPEKTYDIPPAHERRVVDPTGCGDAFRAGLIYGIQHNYDWLTIGRMGNLMGALKVEHPGTQNQRFDFAEFNDQFKQDFGYAL

SEQ ID NO: 225 - DNA, 963 bp, synthetic construct
  misc_feature 1..963: note = Variant of adenosine kinase
  source 1..963: mol_type = other DNA
atgcaccatcatcaccatcacgggggctccggcatgagtgcactgatttgcggttctttagcgtatgataccatcatggtgtttccggaccagttcaagaaccatattctgcctgataaagttcacatcctcaatgtcagctttcttgtaccacgcatgcgtcgtgaatttggaggctgtgccggcaacattgcgtacaatctgcatctgttgggtggtgctccgatccctatgggaacggtgggccaagatttcggtccgtatcgcgagcacttcgaaactctgggcattgacttatcccgcgtcaagatcatcgatgatctgtttacaccgcaggccttcattaccaccgaccatgatcataaccagattacggcgtttcatccaggcgcaatgatgcgttcgtacgaaaatcacgttcgtgatgtgccgggtgttaccttgggcctcgtaggtcctgatggacgcgagggcatgatccaaaatgccgaagaatttgctgctggtggcattccgttcatttttgacccaggtcaggcaatgccgctgttcaacggccccgaactgcgcgagtttatcgaacaggcggactatgtggtggtcaacgattacgaaagcaatcttcttcaagaacgtactggctggaacgagcaggacattgtttcacgcgtgcaggcgtatatcaccacgcaaggtcctaaaggagccctggtacatacaccggagaagacctacgatattcgtggtgcacacgaacgtcgtgtcgttgatccaactggttgcggcgacgcgtttcgcgccggcctgatctatggtattcagcataattatgattggttgaccattggccgcatgggaaacttaatgggtgcgctgaaagtggaacaccctggcacgcaaaatcagcgtttcgattttgccgaattcaacgaccagttcaaacaacagtttggctacgcgctc

SEQ ID NO: 226 - protein, 321 aa, synthetic construct
  REGION 1..321: note = Variant of adenosine kinase
MHHHHHHGGSGMSALICGSLAYDTIMVFPDQFKNHILPDKVHILNVSFLVPRMRREFGGCAGNIAYNLHLLGGAPIPMGTVGQDFGPYREHFETLGIDLSRVKIIDDLFTPQAFITTDHDHNQITAFHPGAMMRSYENHVRDVPGVTLGLVGPDGREGMIQNAEEFAAGGIPFIFDPGQAMPLFNGPELREFIEQADYVVVNDYESNLLQERTGWNEQDIVSRVQAYITTQGPKGALVHTPEKTYDIRGAHERRVVDPTGCGDAFRAGLIYGIQHNYDWLTIGRMGNLMGALKVEHPGTQNQRFDFAEFNDQFKQQFGYAL

SEQ ID NO: 227 - DNA, 963 bp, synthetic construct
  misc_feature 1..963: note = Variant of adenosine kinase
  source 1..963: mol_type = other DNA
atgcaccatcatcaccatcacgggggctccggcatgagtgcactgatttgcggttctttagcgtatgataccatcatggtgtttccggaccagttcaagaaccatattctgcccgataaagttcacatcctcaatgtcagctttcttgtaccacgcatgcgtcgtgaatttggaggctgtgccggcaacattgcgtacaatctgcatctgttgggtggtgctccgatccctatgggaacggtgggccaagatttcggtccgtatcgcgagcacttcgaaactctgggcattgacttatcccgcgtcaagatcatcgatgatctgtttacaccgcaggccttcattaccaccgaccatgatcataaccagattacggcgtttcatccaggcgcaatgatgcgttcgtacgaaaatcacgttcgtgatgtgccgggtgttaccttgggcctcgtaggtcctgatggacgcgagggcatgatccaaaatgccgaagaatttgctgctggtggcattccgttcatttttgacccaggtcaggcactgccgctgttcaacggccccgaactgcgcgagtttatcgaacaggcggactatgtggtggtcaacgattacgaaagcaatcttcttcaagaacgtactggctggaacgagcaggacattgtttcacgcgtgcaggcgtatatcaccacgcaaggtccgaaaggagccctggtacatacaccggagaagacctacgatattccgccggcacacgaacgtcgtgtcgttgatccaactggttgcggcgacgcgtttcgcgccggcctgatctatggtattcagcataattatgattggttgaccattggccgcatgggaaacttaatgggtgcgctgaaagtggaacaccctggcacgcaaaatcagcgtttcgattttgccgaattcaacgaccagttcaaacaacagtttggctacgcgctc

SEQ ID NO: 228 - protein, 321 aa, synthetic construct
  REGION 1..321: note = Variant of adenosine kinase
MHHHHHHGGSGMSALICGSLAYDTIMVFPDQFKNHILPDKVHILNVSFLVPRMRREFGGCAGNIAYNLHLLGGAPIPMGTVGQDFGPYREHFETLGIDLSRVKIIDDLFTPQAFITTDHDHNQITAFHPGAMMRSYENHVRDVPGVTLGLVGPDGREGMIQNAEEFAAGGIPFIFDPGQALPLFNGPELREFIEQADYVVVNDYESNLLQERTGWNEQDIVSRVQAYITTQGPKGALVHTPEKTYDIPPAHERRVVDPTGCGDAFRAGLIYGIQHNYDWLTIGRMGNLMGALKVEHPGTQNQRFDFAEFNDQFKQQFGYAL

SEQ ID NO: 229 - DNA, 963 bp, synthetic construct
  misc_feature 1..963: note = Variant of adenosine kinase
  source 1..963: mol_type = other DNA
atgcaccatcatcaccatcacgggggctccggcatgagtgcactgatttgcggttctttagcgtatgataccatcatggtgtttccggaccagttcaagaaccatattctgcccgataaagttcacatcctcaatgtcagctttcttgtaccacgcatgcgtcgtgaatttggaggctgtgccggcaacattgcgtacaatctgcatctgttgggtggtgctccgatccctatgggaacggtgggccaagatttcggtccgtatcgcgagcacttcgaaactctgggcattgacttatcccgcgtcaagatcatcgatgatctgttcacagcgcaggccttcattaccaccgaccatgatcataaccagattacggcgtttcatccaggggcaatgatgcgttcgtacgaaaatcacgttcgtgatgtgccgggtgttaccttgggcctcgtaggtcctgatggacgcgagggcatgatccaaaatgccgaagaatttgctgctggtggcattccgttcatttttgacccaggtcaggcaatgccgctgttcaacggccccgaactgcgcgagtttatcgaacaggcggactatgtggtggtcaacgattacgaaagcaatcttcttcaagaacgtactggctggaacgagcaggacattgtttcacgcgtgcaggcgtatatcaccacgcaaggtcctaaaggagccctggtacatacaccggagaagacctacgatattccgccggcacacgaacgtcgtgtcgttgatccaactggttgcggcgacgcgtttcgcgccggcctgatctatggtattcagcataattatgattggttgaccattggccgcatgggaaacttaatgggtgcgctgaaagtggaacaccctggcacgcaaaatcagcgtttcgattttgccgaattcaacgaccagttcaaacaacagtttggctacgcgctc

SEQ ID NO: 230 - protein, 321 aa, synthetic construct
  REGION 1..321: note = Variant of adenosine kinase
MHHHHHHGGSGMSALICGSLAYDTIMVFPDQFKNHILPDKVHILNVSFLVPRMRREFGGCAGNIAYNLHLLGGAPIPMGTVGQDFGPYREHFETLGIDLSRVKIIDDLFTAQAFITTDHDHNQITAFHPGAMMRSYENHVRDVPGVTLGLVGPDGREGMIQNAEEFAAGGIPFIFDPGQAMPLFNGPELREFIEQADYVVVNDYESNLLQERTGWNEQDIVSRVQAYITTQGPKGALVHTPEKTYDIPPAHERRVVDPTGCGDAFRAGLIYGIQHNYDWLTIGRMGNLMGALKVEHPGTQNQRFDFAEFNDQFKQQFGYAL

SEQ ID NO: 231 - DNA, 963 bp, synthetic construct
  misc_feature 1..963: note = Variant of adenosine kinase
  source 1..963: mol_type = other DNA
atgcaccatcatcaccatcacgggggctccggcatgagtgcactgatttgcggttctttagcgtatgataccatcatggtgtttccggaccagttcaagaaccatattctgcccgatcgtgttcacatcctcaatgtcagctttcttgtaccacgcatgcgtcgtgaatttggaggctgtgccggcaacattgcgtacaatctgcatctgttgggtggtgctccgatccctatgggaacggtgggccaagatttcggtccgtatcgcgagcacttcgaaactctgggcattgacttatcccgcgtcaagatcatcgatgatctgagtacagcgcaggccttcattaccaccgaccatgatcataaccagattacggcgtttcatccaggggcaatgatgcgttcgtacgaaaatcacgttcgtgatgtgccgggtgttaccttgggcctcgtaggtcctgatggacgcgagggcatgatccaaaatgccgaagaatttgctgctggtggcattccgttcatttttgacccaggtcaggcaatgccgctgttcaacggccccgaactgcgcgagtttatcgaacaggcggactatgtggtggtcaacgattacgaaagcaatcttcttcaagaacgtactggctggaacgagcaggacattgtttcacgcgtgcaggcgtatatcaccacgcaaggttcgaaaggagccctggtacatacaccggagaagacctacgatattccgccggcacacgaacgtcgtgtcgttgatccaactggttgcggcgacgcgtttcgcgccggcctgatctatggtattcagcataattatgattggttgaccattggccgcatgggaaacttaatgggtgcgctgaaagtggaacaccctggcacgcaaaatcagcgtttcgattttgccgaattcaacgaccagttcaaacaacagtttggctacgcgctc

SEQ ID NO: 232 - protein, 321 aa, synthetic construct
  REGION 1..321: note = Variant of adenosine kinase
MHHHHHHGGSGMSALICGSLAYDTIMVFPDQFKNHILPDRVHILNVSFLVPRMRREFGGCAGNIAYNLHLLGGAPIPMGTVGQDFGPYREHFETLGIDLSRVKIIDDLSTAQAFITTDHDHNQITAFHPGAMMRSYENHVRDVPGVTLGLVGPDGREGMIQNAEEFAAGGIPFIFDPGQAMPLFNGPELREFIEQADYVVVNDYESNLLQERTGWNEQDIVSRVQAYITTQGSKGALVHTPEKTYDIPPAHERRVVDPTGCGDAFRAGLIYGIQHNYDWLTIGRMGNLMGALKVEHPGTQNQRFDFAEFNDQFKQQFGYAL

SEQ ID NO: 233 - DNA, 963 bp, synthetic construct
  misc_feature 1..963: note = Variant of adenosine kinase
  source 1..963: mol_type = other DNA
atgcaccatcatcaccatcacgggggctccggcatgagtgcactgatttgcggttctttagcgtatgataccatcatggtgtttccggaccagttcaagcgtcatattctgcctgataaagttcacatcctcaatgtcagctttcttgtaccacgcatgcgtcgtgaatttggaggctgtgccggcaacattgcgtacaatctgcatctgttgggtggtgctccgatccctatgggaacggtgggccaagatttcggtccgtatcgcgagcacttcgaaactctgggcattgacttatcccgcgtcaagatcatcgatgatctgtttacaccgcaggccttcattaccaccgaccatgatcataaccagattacggcgtttcatccaggcgcaatgatgcgttcgtacgaaaatcacgttcgtgatgtgccgggtgttaccttgggcctcgtaggtcctgatggacgcgagggcatgatccaaaatgccgaagaatttgctgctggtggcattccgttcatttttgacccaggtcaggcaatgccgctgttcaacggccccgaactgcgcgagtttatcgaacaggcggactatgtggtggtcaacgattacgaaagcaatcttcttcaagaacgtactggctggaacgagcaggacattgtttcacgcgtgcaggcgtatatcaccacgcaaggtcctaaaggagccctggtacatacaccggagaagacctacgatattcctggtgcacacgaacgtcgtgtcgttgatccaactggttgcggcgacgcgtttcgcgccggcctgatctatggtattcagcataattatgattggttgaccattggccgcatgggaaacttaatgggtgcgctgaaagtggaacaccctggcacgcaaaatcagcgtttcgattttgccgaattcaacgaccagttcaaacaacagtttggctacgcgctc

SEQ ID NO: 234 - protein, 321 aa, synthetic construct
  REGION 1..321: note = Variant of adenosine kinase
MHHHHHHGGSGMSALICGSLAYDTIMVFPDQFKRHILPDKVHILNVSFLVPRMRREFGGCAGNIAYNLHLLGGAPIPMGTVGQDFGPYREHFETLGIDLSRVKIIDDLFTPQAFITTDHDHNQITAFHPGAMMRSYENHVRDVPGVTLGLVGPDGREGMIQNAEEFAAGGIPFIFDPGQAMPLFNGPELREFIEQADYVVVNDYESNLLQERTGWNEQDIVSRVQAYITTQGPKGALVHTPEKTYDIPGAHERRVVDPTGCGDAFRAGLIYGIQHNYDWLTIGRMGNLMGALKVEHPGTQNQRFDFAEFNDQFKQQFGYAL

SEQ ID NO: 235 - DNA, 963 bp, synthetic construct
  misc_feature 1..963: note = Variant of adenosine kinase
  source 1..963: mol_type = other DNA
atgcaccatcatcaccatcacgggggctccggcatgagtgcactgatttgcggttctttagcgtatgataccatcatggtgtttccggaccagttcaagaaccatattctgcccgataaggttcaccgcctcaatgtcagctttcttgtaccacgcatgcgtcgtgaatttggaggctgtgccggcaacattgcgtacaatctgcatctgttgggtggtgctccgatccctatgggaacggtgggccaagatttcggtccgtatcgcgagcacttcgaaactctgggcattgacttatcccgcgtcaagatcatcgatgatctgttcacaccgcaggccttcattaccaccgaccatgatcataaccagattacggcgtttcatccaggcgcaatgatgcgttcgtacgaaaatcacgttcgtgatgtgccgggtgttaccttgggcctcgtaggtcctgatggacgcgagggcatgatccaaaatgccgaagaatttgctgctggtggcattccgttcatttttgacccaggtcaggcaatgccgctgttcaacggccccgaactgcgcgagtttatcgaacaggcggactatgtggtggtcaacgattacgaaagcaatcttcttcaagaacgtactggctggaacgagcaggacattgtttcacgcgtgcaggcgtatatcaccacgcaaggttcgaaaggagccctggtacatacaccggagaagacctacgatattccgccggcacacgaacgtcgtgtcgttgatccaactggttgcggcgacgcgtttcgcgccggcctgatctatggtattcagcataattatgattggttgaccattggccgcatgggaaacttaatgggtgcgctgaaagtggaacaccctggcacgcaaaatcagcgtttcgattttgccgaattcaacgaccagttcaaacaaagctttggctacgcgctc

SEQ ID NO: 236 - protein, 321 aa, synthetic construct
  REGION 1..321: note = Variant of adenosine kinase
MHHHHHHGGSGMSALICGSLAYDTIMVFPDQFKNHILPDKVHRLNVSFLVPRMRREFGGCAGNIAYNLHLLGGAPIPMGTVGQDFGPYREHFETLGIDLSRVKIIDDLFTPQAFITTDHDHNQITAFHPGAMMRSYENHVRDVPGVTLGLVGPDGREGMIQNAEEFAAGGIPFIFDPGQAMPLFNGPELREFIEQADYVVVNDYESNLLQERTGWNEQDIVSRVQAYITTQGSKGALVHTPEKTYDIPPAHERRVVDPTGCGDAFRAGLIYGIQHNYDWLTIGRMGNLMGALKVEHPGTQNQRFDFAEFNDQFKQSFGYAL

SEQ ID NO: 237 - DNA, 963 bp, synthetic construct
  misc_feature 1..963: note = Variant of adenosine kinase
  source 1..963: mol_type = other DNA
atgcaccatcatcaccatcacgggggctccggcatgagtgcactgatttgcggttctttagcgtatgataccatcatggtgtttccggaccagttcaagaaacatattctgtgcgataaagttcacatcctcaatgtcagctttcttgtaccacgcatgcgtcgtgaatttggaggctgtgccggcaacattgcgtacaatctgcatctgttgggtggtgctccgatccctatgggaacggtgggccaagatttcggtccgtatcgcgagcacttcgaaactctgggcattgacttatcccgcgtccgtatcatcgatgatctgtttacaccgcaggccttcattatgaccgaccatgatcataaccagattacggcgtttcatccaggcgcaatgatgcgttcgtacgaaaatcacgttcgtgatgtgccgggtgttaccttgggcctcgtaggtcctgatggacgcgagggcatgatccaaaatgccgaagaatttgctgctggtggcattccgttcatttttgacccaggtcaggcaatgccgctgttcaacggccccgaactgcgcgagtttatcgaacaggcggactatgtggtggtcaacgattacgaaagcaatgtgcttcagacccgtactggctggaacgagcaggacattgtttcacgcgtgcaggcgtatatcaccacgcaaggtcctaaaggagccctggtacatacaccggagaagacctacgatattcgtccggcacacgaacctcgtgtcgttgatccaactggttgcggcgacgcgtttcgcgccggcctgatctatggtattcagcataattatgattggttgaccattggccgcatgggaaacttaatgggtgcgctgaaagtggaacaccctggcacgcaaaatcagcgtttcgattttgccgagttcaacgaccagttcaaacaacagtttggctacgcgctc

SEQ ID NO: 238 - protein, 321 aa, synthetic construct
  REGION 1..321: note = Variant of adenosine kinase
MHHHHHHGGSGMSALICGSLAYDTIMVFPDQFKKHILCDKVHILNVSFLVPRMRREFGGCAGNIAYNLHLLGGAPIPMGTVGQDFGPYREHFETLGIDLSRVRIIDDLFTPQAFIMTDHDHNQITAFHPGAMMRSYENHVRDVPGVTLGLVGPDGREGMIQNAEEFAAGGIPFIFDPGQAMPLFNGPELREFIEQADYVVVNDYESNVLQTRTGWNEQDIVSRVQAYITTQGPKGALVHTPEKTYDIRPAHEPRVVDPTGCGDAFRAGLIYGIQHNYDWLTIGRMGNLMGALKVEHPGTQNQRFDFAEFNDQFKQQFGYAL

SEQ ID NO: 239 - DNA, 963 bp, synthetic construct
  misc_feature 1..963: note = Variant of adenosine kinase
  source 1..963: mol_type = other DNA
atgcaccatcatcaccatcacgggggctccggcatgagtgcactgatttgcggttctttagcgtatgataccatcatggtgtttccggaccagttcaagaaccatattctgcccgataaggttcaccgcctcaatgtcagctttcttgtaccacgcatgcgtcgtgaatttggaggctgtgccggcaacattgcgtacaatctgcatctgttgggtggtgctccgatccctatgggaacggtgggccaagatttcggtccgtatcgcgagcacttcgaaactctgggcattgacttatcccgcgtcaagatcatcgatgatctgttcacaccgcaggccttcattaccaccgaccatgatcataaccagattacggcgtttcatccaggggcaatgatgcgttcgtacgaaaatcacgttcgtgatgtgccgggtgttaccttgggcctcgtaggtcctgatggacgcgagggcatgatccaaaatgccgaagaatttgctgctggtggcattccgttcatttttgacccaggtcaggcactgccgctgttcaacggccccgaactgcgcgagtttatcgaacaggcggactatgtggtggtcaacgattacgaaagcaatcttcttcaagaacgtactggctggaacgagcaggacattgtttcacgcgtgcaggcgtatatcaccacgcaaggttcgaaaggagccctggtacatacaccggagaagacctacgatattccgccggcacacgaacgtcgtgtcgttgatccaactggttgcggcgacgcgtttcgcgccggcctgatctatggtattcagcataattatgattggttgaccattggccgcatgggaaacttaatgggtgcgctgaaagtggaacaccctggcacgcaaaatcagcgtttcgattttgccgaattcaacgaccagttcaaacaaagctttggctacgcgctc

SEQ ID NO: 240 - protein, 321 aa, synthetic construct
  REGION 1..321: note = Variant of adenosine kinase
MHHHHHHGGSGMSALICGSLAYDTIMVFPDQFKNHILPDKVHRLNVSFLVPRMRREFGGCAGNIAYNLHLLGGAPIPMGTVGQDFGPYREHFETLGIDLSRVKIIDDLFTPQAFITTDHDHNQITAFHPGAMMRSYENHVRDVPGVTLGLVGPDGREGMIQNAEEFAAGGIPFIFDPGQALPLFNGPELREFIEQADYVVVNDYESNLLQERTGWNEQDIVSRVQAYITTQGSKGALVHTPEKTYDIPPAHERRVVDPTGCGDAFRAGLIYGIQHNYDWLTIGRMGNLMGALKVEHPGTQNQRFDFAEFNDQFKQSFGYAL

SEQ ID NO: 241 - DNA, 963 bp, synthetic construct
  misc_feature 1..963: note = Variant of adenosine kinase
  source 1..963: mol_type = other DNA
atgcaccatcatcaccatcacgggggctccggcatgagtgcactgatttgcggttctttagcgtatgataccatcatggtgtttccggaccagttcaagcgtcatattctgtgcgataaagttcacatcctcaatgtcagctttcttgtaccacgcatgcgtcgtgaatttggaggctgtgccggcaacattgcgtacaatctgcatctgttgggtggtgctccgatccctatgggaacggtgggccaagatttcggtccgtatcgcgagcacttcgaaactctgggcattgacttatcccgcgtccgtatcatcgatgatctgtttacaccgcaggccttcattatgaccgaccatgatcataaccagattacggcgtttcatccaggcgcaatgatgcgttcgtacgaaaatcacgttcgtgatgtgccgggtgttaccttgggcctcgtaggtcctgatggacgcgagggcatgatccaaaatgccgaagaatttgctgctggtggcattccgttcatttttgacccaggtcaggcaatgccgctgttcaacggccccgaactgcgcgagtttatcgaacaggcggactatgtggtggtcaacgattacgaaagcaatcttcttcaagaacgtactggctggaacgagcaggacattgtttcacgcgtgcaggcgtatatcaccacgcaaggtcctaaaggagccctggtacatacaccggagaagacctacgatattccgccggcacacgaacctcgtgtcgttgatccaactggttgcggcgacgcgtttcgcgccggcctgatctatggtattcagcataattatgattggttgaccattggccgcatgggaaacttaatgggtgcgctgaaagtggaacaccctggcacgcaaaatcagcgtttcgattttgccgaattcaacgaccagttcaaacaacagtttggctacgcgctc

SEQ ID NO: 242 - protein, 321 aa, synthetic construct
  REGION 1..321: note = Variant of adenosine kinase
MHHHHHHGGSGMSALICGSLAYDTIMVFPDQFKRHILCDKVHILNVSFLVPRMRREFGGCAGNIAYNLHLLGGAPIPMGTVGQDFGPYREHFETLGIDLSRVRIIDDLFTPQAFIMTDHDHNQITAFHPGAMMRSYENHVRDVPGVTLGLVGPDGREGMIQNAEEFAAGGIPFIFDPGQAMPLFNGPELREFIEQADYVVVNDYESNLLQERTGWNEQDIVSRVQAYITTQGPKGALVHTPEKTYDIPPAHEPRVVDPTGCGDAFRAGLIYGIQHNYDWLTIGRMGNLMGALKVEHPGTQNQRFDFAEFNDQFKQQFGYAL

SEQ ID NO: 243 - DNA, 963 bp, synthetic construct
  misc_feature 1..963: note = Variant of adenosine kinase
  source 1..963: mol_type = other DNA
atgcaccatcatcaccatcacgggggctccggcatgagtgcactgatttgcggttctttagcgtatgataccatcatggtgtttccggaccagttcaagaaccatattctgcccgatcgtgttcaccgcctcaatgtcagctttcttgtaccacgcatgcgtcgtgaatttggaggctgtgccggcaacattgcgtacaatctgcatctgttgggtggtgctccgatccctatgggaacggtgggccaagatttcggtccgtatcgcgagcacttcgaaactctgggcattgacttatcccgcgtcaagatcatcgatgatctgttcacagcgcaggccttcattaccaccgaccatgatcataaccagattacggcgtttcatccaggcgcaatgatgcgttcgtacgaaaatcacgttcgtgatgtgccgggtgttaccttgggcctcgtaggtcctgatggacgcgagggcatgatccaaaatgccgaagaatttgctgctggtggcattccgttcatttttgacccaggtcaggcaatgccgctgttcaacggccccgaactgcgcgagtttatcgaacaggcggactatgtggtggtcaacgattacgaaagcaatcttcttcaagaacgtactggctggaacgagcaggacattgtttcacgcgtgcaggcgtatatcaccacgcaaggttcgaaaggagccctggtacatacaccggagaagacctacgatattccgccggcacacgaacgtcgtgtcgttgatccaactggttgcggcgacgcgtttcgcgccggcctgatctatggtattcagcataattatgattggttgaccattggccgcatgggaaacttaatgggtgcgctgaaagtggaacaccctggcacgcaaaatcagcgtttcgattttgccgaattcaacgaccagttcaaacaagattttggctacgcgctc

SEQ ID NO: 244 - protein, 321 aa, synthetic construct
  REGION 1..321: note = Variant of adenosine kinase
MHHHHHHGGSGMSALICGSLAYDTIMVFPDQFKNHILPDRVHRLNVSFLVPRMRREFGGCAGNIAYNLHLLGGAPIPMGTVGQDFGPYREHFETLGIDLSRVKIIDDLFTAQAFITTDHDHNQITAFHPGAMMRSYENHVRDVPGVTLGLVGPDGREGMIQNAEEFAAGGIPFIFDPGQAMPLFNGPELREFIEQADYVVVNDYESNLLQERTGWNEQDIVSRVQAYITTQGSKGALVHTPEKTYDIPPAHERRVVDPTGCGDAFRAGLIYGIQHNYDWLTIGRMGNLMGALKVEHPGTQNQRFDFAEFNDQFKQDFGYAL

SEQ ID NO: 245 - DNA, 963 bp, synthetic construct
  misc_feature 1..963: note = Variant of adenosine kinase
  source 1..963: mol_type = other DNA
atgcaccatcatcaccatcacgggggctccggcatgagtgcactgatttgcggttctttagcgtatgataccatcatggtgtttccggaccagttcaagaaacatattctgcctgataaagttcacatcctcaatgtcagctttcttgtaccacgcatgcgtcgtgaatttggaggctgtgccggcaacattgcgtacaatctgcatctgttgggtggtgctccgatccctatgggaacggtgggccaagatttcggtccgtatcgcgagcacttcgaaactctgggcattgacttatcccgcgtcaagatcatcgatgatctgtttacaccgcaggccttcattaccaccgaccatgatcataaccagattacggcgtttcatccaggcgcaatgatgcgttcgtacgaaaatcacgttcgtgatgtgccgggtgttaccttgggcctcgtaggtcctgatggacgcgagggcatgatccaaaatgccgaagaatttgctgctggtggcattccgttcatttttgacccaggtcaggcaatgccgctgttcaacggccccgaactgcgcgagtttatcgaacaggcggactatgtggtggtcaacgattacgaaagcaatcttcttcaagaacgtactggctggaacgagcaggacattgtttcacgcgtgcaggcgtatatcaccacgcaaggtcctaaaggagccctggtacatacaccggagaagacctacgatattccgccggcacacgaacgtcgtgtcgttgatccaactggttgcggcgacgcgtttcgcgccggcctgatctatggtattcagcataattatgattggttgaccattggccgcatgggaaacttaatgggtgcgctgaaagtggaacaccctggcacgcaaaatcagcgtttcgattttgccgagttcaacgaccagttcaaacaacagtttggctacgcgctc

SEQ ID NO: 246 - protein, 321 aa, synthetic construct
  REGION 1..321: note = Variant of adenosine kinase
MHHHHHHGGSGMSALICGSLAYDTIMVFPDQFKKHILPDKVHILNVSFLVPRMRREFGGCAGNIAYNLHLLGGAPIPMGTVGQDFGPYREHFETLGIDLSRVKIIDDLFTPQAFITTDHDHNQITAFHPGAMMRSYENHVRDVPGVTLGLVGPDGREGMIQNAEEFAAGGIPFIFDPGQAMPLFNGPELREFIEQADYVVVNDYESNLLQERTGWNEQDIVSRVQAYITTQGPKGALVHTPEKTYDIPPAHERRVVDPTGCGDAFRAGLIYGIQHNYDWLTIGRMGNLMGALKVEHPGTQNQRFDFAEFNDQFKQQFGYAL

SEQ ID NO: 247 - DNA, 963 bp, synthetic construct
  misc_feature 1..963: note = Variant of adenosine kinase
  source 1..963: mol_type = other DNA
atgcaccatcatcaccatcacgggggctccggcatgagtgcactgatttgcggttctttagcgtatgataccatcatggtgtttccggaccagttcaagaaccatattctgcccgatcgtgttcacatcctcaatgtcagctttcttgtaccacgcatgcgtcgtgaatttggaggctgtgccggcaacattgcgtacaatctgcatctgttgggtggtgctccgatccctatgggaacggtgggccaagatttcggtccgtatcgcgagcacttcgaaactctgggcattgacttatcccgcgtcaagatcatcgatgatctgtttacaccgcaggccttcattaccaccgaccatgatcataaccagattacggcgtttcatccaggcgcaatgatgcgttcgtacgaaaatcacgttcgtgatgtgccgggtgttaccttgggcctcgtaggtcctgatggacgcgagggcatgatccaaaatgccgaagaatttgctgctggtggcattccgttcatttttgacccaggtcaggcaatgccgctgttcaacggccccgaactgcgcgagtttatcgaacaggcggactatgtggtggtcaacgattacgaaagcaatcttcttcaagaacgtactggctggaacgagcaggacattgtttcacgcgtgcaggcgtatatcaccacgcaaggttcgaaaggagccctggtacatacaccggagaagacctacgatattccgccggcacacgaacgtcgtgtcgttgatccaactggttgcggcgacgcgtttcgcgccggcctgatctatggtattcagcataattatgattggttgaccattggccgcatgggaaacttaatgggtgcgctgaaagtggaacaccctggcacgcaaaatcagcgtttcgattttgccgaattcaacgaccagttcaaacaacagtttggctacgcgctc

SEQ ID NO: 248 - protein, 321 aa, synthetic construct
  REGION 1..321: note = Variant of adenosine kinase
MHHHHHHGGSGMSALICGSLAYDTIMVFPDQFKNHILPDRVHILNVSFLVPRMRREFGGCAGNIAYNLHLLGGAPIPMGTVGQDFGPYREHFETLGIDLSRVKIIDDLFTPQAFITTDHDHNQITAFHPGAMMRSYENHVRDVPGVTLGLVGPDGREGMIQNAEEFAAGGIPFIFDPGQAMPLFNGPELREFIEQADYVVVNDYESNLLQERTGWNEQDIVSRVQAYITTQGSKGALVHTPEKTYDIPPAHERRVVDPTGCGDAFRAGLIYGIQHNYDWLTIGRMGNLMGALKVEHPGTQNQRFDFAEFNDQFKQQFGYAL

SEQ ID NO: 249 - DNA, 963 bp, synthetic construct
  misc_feature 1..963: note = Variant of adenosine kinase
  source 1..963: mol_type = other DNA
atgcaccatcatcaccatcacgggggctccggcatgagtgcactgatttgcggttctttagcgtatgataccatcatggtgtttccggaccagttcaagaaccatattctgcccgataaggttcacatcctcaatgtcagctttcttgtaccacgcatgcgtcgtgaatttggaggctgtgccggcaacattgcgtacaatctgcatctgttgggtggtgctccgatccctatgggaacggtgggccaagatttcggtccgtatcgcgagcacttcgaaactctgggcattgacttatcccgcgtcaagatcatcgatgatctgagtacaccgcaggccttcattaccaccgaccatgatcataaccagattacggcgtttcatccaggggcaatgatgcgttcgtacgaaaatcacgttcgtgatgtgccgggtgttaccttgggcctcgtaggtcctgatggacgcgagggcatgatccaaaatgccgaagaatttgctgctggtggcattccgttcatttttgacccaggtcaggcaatgccgctgttcaacggccccgaactgcgcgagtttatcgaacaggcggactatgtggtggtcaacgattacgaaagcaatcttcttcaagaacgtactggctggaacgagcaggacattgtttcacgcgtgcaggcgtatatcaccacgcaaggtccgaaaggagccctggtacatacaccggagaagacctacgatattccgccggcacacgaacgtcgtgtcgttgatccaactggttgcggcgacgcgtttcgcgccggcctgatctatggtattcagcataattatgattggttgaccattggccgcatgggaaacttaatgggtgcgctgaaagtggaacaccctggcacgcaaaatcagcgtttcgattttgccgaattcaacgaccagttcaaacaacagtttggctacgcgctc

SEQ ID NO: 250 - protein, 321 aa, synthetic construct
  REGION 1..321: note = Variant of adenosine kinase
MHHHHHHGGSGMSALICGSLAYDTIMVFPDQFKNHILPDKVHILNVSFLVPRMRREFGGCAGNIAYNLHLLGGAPIPMGTVGQDFGPYREHFETLGIDLSRVKIIDDLSTPQAFITTDHDHNQITAFHPGAMMRSYENHVRDVPGVTLGLVGPDGREGMIQNAEEFAAGGIPFIFDPGQAMPLFNGPELREFIEQADYVVVNDYESNLLQERTGWNEQDIVSRVQAYITTQGPKGALVHTPEKTYDIPPAHERRVVDPTGCGDAFRAGLIYGIQHNYDWLTIGRMGNLMGALKVEHPGTQNQRFDFAEFNDQFKQQFGYAL

SEQ ID NO: 251 - DNA, 963 bp, synthetic construct
  misc_feature 1..963: note = Variant of adenosine kinase
  source 1..963: mol_type = other DNA
atgcaccatcatcaccatcacgggggctccggcatgagtgcactgatttgcggttctttagcgtatgataccatcatggtgtttccggaccagttcaagaaccatattctgcctgataaagttcacatcctcaatgtcagctttcttgtaccacgcatgcgtcgtgaatttggaggctgtgccggcaacattgcgtacaatctgcatctgttgggtggtgctccgatccctatgggaacggtgggccaagatttcggtccgtatcgcgagcacttcgaaactctgggcattgacttatcccgcgtcaagatcatcgatgatctgtttacaccgcaggccttcattaccaccgaccatgatcataaccagattacggcgtttcatccaggcgcaatgatgcgttcgtacgaaaatcacgttcgtgatgtgccgggtgttaccttgggcctcgtaggtcctgatggacgcgagggcatgatccaaaatgccgaagaatttgctgctggtggcattccgttcatttttgacccaggtcaggcaatgccgctgttcaacggccccgaactgcgcgagtttatcgaacaggcggactatgtggtggtcaacgattacgaaagcaatctgcttcaggaacgtactggctggaacgagcaggacattgtttcacgcgtgcaggcgtatatcaccacgcaaggtcctaaaggagccctggtacatacaccggagaagacctacgatattccgccggcacacgaacgtcgtgtcgttgatccaactggttgcggcgacgcgtttcgcgccggcctgatctatggtattcagcataattatgattggttgaccattggccgcatgggaaacttaatgggtgcgctgaaagtggaacaccctggcacgcaaaatcagcgtttcgattttgccttcttcaacgaccagttcaaacaacagtttggctacgcgctc

SEQ ID NO: 252 - protein, 321 aa, synthetic construct
  REGION 1..321: note = Variant of adenosine kinase
MHHHHHHGGSGMSALICGSLAYDTIMVFPDQFKNHILPDKVHILNVSFLVPRMRREFGGCAGNIAYNLHLLGGAPIPMGTVGQDFGPYREHFETLGIDLSRVKIIDDLFTPQAFITTDHDHNQITAFHPGAMMRSYENHVRDVPGVTLGLVGPDGREGMIQNAEEFAAGGIPFIFDPGQAMPLFNGPELREFIEQADYVVVNDYESNLLQERTGWNEQDIVSRVQAYITTQGPKGALVHTPEKTYDIPPAHERRVVDPTGCGDAFRAGLIYGIQHNYDWLTIGRMGNLMGALKVEHPGTQNQRFDFAFFNDQFKQQFGYAL

SEQ ID NO: 253 - DNA, 963 bp, synthetic construct
  misc_feature 1..963: note = Variant of adenosine kinase
  source 1..963: mol_type = other DNA
atgcaccatcatcaccatcacgggggctccggcatgagtgcactgatttgcggttctttagcgtatgataccatcatggtgtttccggaccagttcaagaaccatattctgcccgatcgtgttcaccgcctcaatgtcagctttcttgtaccacgcatgcgtcgtgaatttggaggctgtgccggcaacattgcgtacaatctgcatctgttgggtggtgctccgatccctatgggaacggtgggccaagatttcggtccgtatcgcgagcacttcgaaactctgggcattgacttatcccgcgtcaagatcatcgatgatctgagtacaccgcaggccttcattaccaccgaccatgatcataaccagattacggcgtttcatccaggcgcaatgatgcgttcgtacgaaaatcacgttcgtgatgtgccgggtgttaccttgggcctcgtaggtcctgatggacgcgagggcatgatccaaaatgccgaagaatttgctgctggtggcattccgttcatttttgacccaggtcaggcactgccgctgttcaacggccccgaactgcgcgagtttatcgaacaggcggactatgtggtggtcaacgattacgaaagcaatcttcttcaagaacgtactggctggaacgagcaggacattgtttcacgcgtgcaggcgtatatcaccacgcaaggttcgaaaggagccctggtacatacaccggagaagacctacgatattccgccggcacacgaacgtcgtgtcgttgatccaactggttgcggcgacgcgtttcgcgccggcctgatctatggtattcagcataattatgattggttgaccattggccgcatgggaaacttaatgggtgcgctgaaagtggaacaccctggcacgcaaaatcagcgtttcgattttgccgaattcaacgaccagttcaaacaagattttggctacgcgctc

SEQ ID NO: 254 - protein, 321 aa, synthetic construct
  REGION 1..321: note = Variant of adenosine kinase
MHHHHHHGGSGMSALICGSLAYDTIMVFPDQFKNHILPDRVHRLNVSFLVPRMRREFGGCAGNIAYNLHLLGGAPIPMGTVGQDFGPYREHFETLGIDLSRVKIIDDLSTPQAFITTDHDHNQITAFHPGAMMRSYENHVRDVPGVTLGLVGPDGREGMIQNAEEFAAGGIPFIFDPGQALPLFNGPELREFIEQADYVVVNDYESNLLQERTGWNEQDIVSRVQAYITTQGSKGALVHTPEKTYDIPPAHERRVVDPTGCGDAFRAGLIYGIQHNYDWLTIGRMGNLMGALKVEHPGTQNQRFDFAEFNDQFKQDFGYAL

SEQ ID NO: 255 - DNA, 963 bp, synthetic construct
  misc_feature 1..963: note = Variant of adenosine kinase
  source 1..963: mol_type = other DNA
atgcaccatcatcaccatcacgggggctccggcatgagtgcactgatttgcggttctttagcgtatgataccatcatggtgtttccggaccagttcaagcgtcatattctgtgcgataaagttcacatcctcaatgtcagctttcttgtaccacgcatgcgtcgtgaatttggaggctgtgccggcaacattgcgtacaatctgcatctgttgggtggtgctccgatccctatgggaacggtgggccaagatttcggtccgtatcgcgagcacttcgaaactctgggcattgacttatcccgcgtcaagatcatcgatgatctgtttacaccgcaggccttcattaccaccgaccatgatcataaccagattacggcgtttcatccaggcgcaatgatgcgttcgtacgaaaatcacgttcgtgatgtgccgggtgttaccttgggcctcgtaggtcctgatggacgcgagggcatgatccaaaatgccgaagaatttgctgctggtggcattccgttcatttttgacccaggtcaggcaatgccgctgttcaacggccccgaactgcgcgagtttatcgaacaggcggactatgtggtggtcaacgattacgaaagcaatgtgcttcaggaacgtactggctggaacgagcaggacattgtttcacgcgtgcaggcgtatatcaccacgcaaggtcctaaaggagccctggtacatacaccggagaagacctacgatattcctccggcacacgaacctcgtgtcgttgatccaactggttgcggcgacgcgtttcgcgccggcctgatctatggtattcagcataattatgattggttgaccattggccgcatgggaaacttaatgggtgcgctgaaagtggaacaccctggcacgcaaaatcagcgtttcgattttgccgagttcaacgaccagttcaaacaacagtttggctacgcgctc

SEQ ID NO: 256 - protein, 321 aa, synthetic construct
  REGION 1..321: note = Variant of adenosine kinase
MHHHHHHGGSGMSALICGSLAYDTIMVFPDQFKRHILCDKVHILNVSFLVPRMRREFGGCAGNIAYNLHLLGGAPIPMGTVGQDFGPYREHFETLGIDLSRVKIIDDLFTPQAFITTDHDHNQITAFHPGAMMRSYENHVRDVPGVTLGLVGPDGREGMIQNAEEFAAGGIPFIFDPGQAMPLFNGPELREFIEQADYVVVNDYESNVLQERTGWNEQDIVSRVQAYITTQGPKGALVHTPEKTYDIPPAHEPRVVDPTGCGDAFRAGLIYGIQHNYDWLTIGRMGNLMGALKVEHPGTQNQRFDFAEFNDQFKQQFGYAL

SEQ ID NO: 257 - DNA, 963 bp, synthetic construct
  misc_feature 1..963: note = Variant of adenosine kinase
  source 1..963: mol_type = other DNA
atgcaccatcatcaccatcacgggggctccggcatgagtgcactgatttgcggttctttagcgtatgataccatcatggtgtttccggaccagttcaagaaccatattctgcctgataaagttcacatcctcaatgtcagctttcttgtaccacgcatgcgtcgtgaatttggaggctgtgccggcaacattgcgtacaatctgcatctgttgggtggtgctccgatccctatgggaacggtgggccaagatttcggtccgtatcgcgagcacttcgaaactctgggcattgacttatcccgcgtccgtatcatcgatgatctgtttacaccgcaggccttcattaccaccgaccatgatcataaccagattacggcgtttcatccaggcgcaatgatgcgttcgtacgaaaatcacgttcgtgatgtgccgggtgttaccttgggcctcgtaggtcctgatggacgcgagggcatgatccaaaatgccgaagaatttgctgctggtggcattccgttcatttttgacccaggtcaggcaatgccgctgttcaacggccccgaactgcgcgagtttatcgaacaggcggactatgtggtggtcaacgattacgaaagcaatcttcttcaagaacgtactggctggaacgagcaggacattgtttcacgcgtgcaggcgtatatcaccacgcaaggtcctaaaggagccctggtacatacaccggagaagacctacgatattcctggtgcacacgaacctcgtgtcgttgatccaactggttgcggcgacgcgtttcgcgccggcctgatctatggtattcagcataattatgattggttgaccattggccgcatgggaaacttaatgggtgcgctgaaagtggaacaccctggcacgcaaaatcagcgtttcgattttgccttcttcaacgaccagttcaaacaacagtttggctacgcgctc

SEQ ID NO: 258 - protein, 321 aa, synthetic construct
  REGION 1..321: note = Variant of adenosine kinase
MHHHHHHGGSGMSALICGSLAYDTIMVFPDQFKNHILPDKVHILNVSFLVPRMRREFGGCAGNIAYNLHLLGGAPIPMGTVGQDFGPYREHFETLGIDLSRVRIIDDLFTPQAFITTDHDHNQITAFHPGAMMRSYENHVRDVPGVTLGLVGPDGREGMIQNAEEFAAGGIPFIFDPGQAMPLFNGPELREFIEQADYVVVNDYESNLLQERTGWNEQDIVSRVQAYITTQGPKGALVHTPEKTYDIPGAHEPRVVDPTGCGDAFRAGLIYGIQHNYDWLTIGRMGNLMGALKVEHPGTQNQRFDFAFFNDQFKQQFGYAL

SEQ ID NO: 259 - DNA, 963 bp, synthetic construct
  misc_feature 1..963: note = Variant of adenosine kinase
  source 1..963: mol_type = other DNA
atgcaccatcatcaccatcacgggggctccggcatgagtgcactgatttgcggttctttagcgtatgataccatcatggtgtttccggaccagttcaagcgtcatattctgtgcgataaagttcacatcctcaatgtcagctttcttgtaccacgcatgcgtcgtgaatttggaggctgtgccggcaacattgcgtacaatctgcatctgttgggtggtgctccgatccctatgggaacggtgggccaagatttcggtccgtatcgcgagcacttcgaaactctgggcattgacttatcccgcgtcaagatcatcgatgatctgtttacaccgcaggccttcattatgaccgaccatgatcataaccagattacggcgtttcatccaggcgcaatgatgcgttcgtacgaaaatcacgttcgtgatgtgccgggtgttaccttgggcctcgtaggtcctgatggacgcgagggcatgatccaaaatgccgaagaatttgctgctggtggcattccgttcatttttgacccaggtcaggcaatgccgctgttcaacggccccgaactgcgcgagtttatcgaacaggcggactatgtggtggtcaacgattacgaaagcaatgtgcttcaggaacgtactggctggaacgagcaggacattgtttcacgcgtgcaggcgtatatcaccacgcaaggtcctaaaggagccctggtacatacaccggagaagacctacgatattccgccggcacacgaacgtcgtgtcgttgatccaactggttgcggcgacgcgtttcgcgccggcctgatctatggtattcagcataattatgattggttgaccattggccgcatgggaaacttaatgggtgcgctgaaagtggaacaccctggcacgcaaaatcagcgtttcgattttgccgagttcaacgaccagttcaaacaacagtttggctacgcgctc

SEQ ID NO: 260 - protein, 321 aa, synthetic construct
  REGION 1..321: note = Variant of adenosine kinase
MHHHHHHGGSGMSALICGSLAYDTIMVFPDQFKRHILCDKVHILNVSFLVPRMRREFGGCAGNIAYNLHLLGGAPIPMGTVGQDFGPYREHFETLGIDLSRVKIIDDLFTPQAFIMTDHDHNQITAFHPGAMMRSYENHVRDVPGVTLGLVGPDGREGMIQNAEEFAAGGIPFIFDPGQAMPLFNGPELREFIEQADYVVVNDYESNVLQERTGWNEQDIVSRVQAYITTQGPKGALVHTPEKTYDIPPAHERRVVDPTGCGDAFRAGLIYGIQHNYDWLTIGRMGNLMGALKVEHPGTQNQRFDFAEFNDQFKQQFGYAL

SEQ ID NO: 261 - DNA, 963 bp, synthetic construct
  misc_feature 1..963: note = Variant of adenosine kinase
  source 1..963: mol_type = other DNA
atgcaccatcatcaccatcacgggggctccggcatgagtgcactgatttgcggttctttagcgtatgataccatcatggtgtttccggaccagttcaagaaccatattctgtgcgataaagttcacatcctcaatgtcagctttcttgtaccacgcatgcgtcgtgaatttggaggctgtgccggcaacattgcgtacaatctgcatctgttgggtggtgctccgatccctatgggaacggtgggccaagatttcggtccgtatcgcgagcacttcgaaactctgggcattgacttatcccgcgtcaagatcatcgatgatctgtttacaccgcaggccttcattaccaccgaccatgatcataaccagattacggcgtttcatccaggcgcaatgatgcgttcgtacgaaaatcacgttcgtgatgtgccgggtgttaccttgggcctcgtaggtcctgatggacgcgagggcatgatccaaaatgccgaagaatttgctgctggtggcattccgttcatttttgacccaggtcaggcaatgccgctgttcaacggccccgaactgcgcgagtttatcgaacaggcggactatgtggtggtcaacgattacgaaagcaatcttcttcaagaacgtactggctggaacgagcaggacattgtttcacgcgtgcaggcgtatatcaccacgcaaggtcctaaaggagccctggtacatacaccggagaagacctacgatattcctggtgcacacgaacgtcgtgtcgttgatccaactggttgcggcgacgcgtttcgcgccggcctgatctatggtattcagcataattatgattggttgaccattggccgcatgggaaacttaatgggtgcgctgaaagtggaacaccctggcacgcaaaatcagcgtttcgattttgccgaattcaacgaccagttcaaacaacagtttggctacgcgctc

SEQ ID NO: 262 - protein, 321 aa, synthetic construct
  REGION 1..321: note = Variant of adenosine kinase
MHHHHHHGGSGMSALICGSLAYDTIMVFPDQFKNHILCDKVHILNVSFLVPRMRREFGGCAGNIAYNLHLLGGAPIPMGTVGQDFGPYREHFETLGIDLSRVKIIDDLFTPQAFITTDHDHNQITAFHPGAMMRSYENHVRDVPGVTLGLVGPDGREGMIQNAEEFAAGGIPFIFDPGQAMPLFNGPELREFIEQADYVVVNDYESNLLQERTGWNEQDIVSRVQAYITTQGPKGALVHTPEKTYDIPGAHERRVVDPTGCGDAFRAGLIYGIQHNYDWLTIGRMGNLMGALKVEHPGTQNQRFDFAEFNDQFKQQFGYAL

SEQ ID NO: 263 - DNA, 963 bp, synthetic construct
  misc_feature 1..963: note = Variant of adenosine kinase
  source 1..963: mol_type = other DNA
atgcaccatcatcaccatcacgggggctccggcatgagtgcactgatttgcggttctttagcgtatgataccatcatggtgtttccggaccagttcaagaaacatattctgtgtgataaagttcacatcctcaatgtcagctttcttgtaccacgcatgcgtcgtgaatttggaggctgtgccggcaacattgcgtacaatctgcatctgttgggtggtgctccgatccctatgggaacggtgggccaagatttcggtccgtatcgcgagcacttcgaaactctgggcattgacttatcccgcgtcaagatcatcgatgatctgtttacaccgcaggccttcattatgaccgaccatgatcataaccagattacggcgtttcatccaggcgcaatgatgcgttcgtacgaaaatcacgttcgtgatgtgccgggtgttaccttgggcctcgtaggtcctgatggacgcgagggcatgatccaaaatgccgaagaatttgctgctggtggcattccgttcatttttgacccaggtcaggcaatgccgctgttcaacggccccgaactgcgcgagtttatcgaacaggcggactatgtggtggtcaacgattacgaaagcaatctgcttcagacccgtactggctggaacgagcaggacattgtttcacgcgtgcaggcgtatatcaccacgcaaggtcctaaaggagccctggtacatacaccggagaagacctacgatattcgtccggcacacgaacctcgtgtcgttgatccaactggttgcggcgacgcgtttcgcgccggcctgatctatggtattcagcataattatgattggttgaccattggccgcatgggaaacttaatgggtgcgctgaaagtggaacaccctggcacgcaaaatcagcgtttcgattttgccttgttcaacgaccagttcaaacaacagtttggctacgcgctc

SEQ ID NO: 264 - protein, 321 aa, synthetic construct
  REGION 1..321: note = Variant of adenosine kinase
MHHHHHHGGSGMSALICGSLAYDTIMVFPDQFKKHILCDKVHILNVSFLVPRMRREFGGCAGNIAYNLHLLGGAPIPMGTVGQDFGPYREHFETLGIDLSRVKIIDDLFTPQAFIMTDHDHNQITAFHPGAMMRSYENHVRDVPGVTLGLVGPDGREGMIQNAEEFAAGGIPFIFDPGQAMPLFNGPELREFIEQADYVVVNDYESNLLQTRTGWNEQDIVSRVQAYITTQGPKGALVHTPEKTYDIRPAHEPRVVDPTGCGDAFRAGLIYGIQHNYDWLTIGRMGNLMGALKVEHPGTQNQRFDFALFNDQFKQQFGYAL

SEQ ID NO: 265 - DNA, 963 bp, synthetic construct
  misc_feature 1..963: note = Variant of adenosine kinase
  source 1..963: mol_type = other DNA
atgcaccatcatcaccatcacgggggctccggcatgagtgcactgatttgcggttctttagcgtatgataccatcatggtgtttccggaccagttcaagaaccatattctgcccgatcgtgttcaccgcctcaatgtcagctttcttgtaccacgcatgcgtcgtgaatttggaggctgtgccggcaacattgcgtacaatctgcatctgttgggtggtgctccgatccctatgggaacggtgggccaagatttcggtccgtatcgcgagcacttcgaaactctgggcattgacttatcccgcgtcaagatcatcgatgatctgtttacaccgcaggccttcattaccaccgaccatgatcataaccagattacggcgtttcatccaggcgcaatgatgcgttcgtacgaaaatcacgttcgtgatgtgccgggtgttaccttgggcctcgtaggtcctgatggacgcgagggcatgatccaaaatgccgaagaatttgctgctggtggcattccgttcatttttgacccaggtcaggcaatgccgctgttcaacggccccgaactgcgcgagtttatcgaacaggcggactatgtggtggtcaacgattacgaaagcaatcttcttcaagaacgtactggctggaacgagcaggacattgtttcacgcgtgcaggcgtatatcaccacgcaaggtcctaaaggagccctggtacatacaccggagaagacctacgatattccgccggcacacgaacgtcgtgtcgttgatccaactggttgcggcgacgcgtttcgcgccggcctgatctatggtattcagcataattatgattggttgaccattggccgcatgggaaacttaatgggtgcgctgaaagtggaacaccctggcacgcaaaatcagcgtttcgattttgccgaattcaacgaccagttcaaacaacagtttggctacgcgctc

SEQ ID NO: 266 - protein, 321 aa, synthetic construct
  REGION 1..321: note = Variant of adenosine kinase
MHHHHHHGGSGMSALICGSLAYDTIMVFPDQFKNHILPDRVHRLNVSFLVPRMRREFGGCAGNIAYNLHLLGGAPIPMGTVGQDFGPYREHFETLGIDLSRVKIIDDLFTPQAFITTDHDHNQITAFHPGAMMRSYENHVRDVPGVTLGLVGPDGREGMIQNAEEFAAGGIPFIFDPGQAMPLFNGPELREFIEQADYVVVNDYESNLLQERTGWNEQDIVSRVQAYITTQGPKGALVHTPEKTYDIPPAHERRVVDPTGCGDAFRAGLIYGIQHNYDWLTIGRMGNLMGALKVEHPGTQNQRFDFAEFNDQFKQQFGYAL

SEQ ID NO: 267 - DNA, 963 bp, synthetic construct
  misc_feature 1..963: note = Variant of adenosine kinase
  source 1..963: mol_type = other DNA
atgcaccatcatcaccatcacgggggctccggcatgagtgcactgatttgcggttctttagcgtatgataccatcatggtgtttccggaccagttcaagcgtcatattctgcctgataaagttcacatcctcaatgtcagctttcttgtaccacgcatgcgtcgtgaatttggaggctgtgccggcaacattgcgtacaatctgcatctgttgggtggtgctccgatccctatgggaacggtgggccaagatttcggtccgtatcgcgagcacttcgaaactctgggcattgacttatcccgcgtcaagatcatcgatgatctgtttacaccgcaggccttcattaccaccgaccatgatcataaccagattacggcgtttcatccaggcgcaatgatgcgttcgtacgaaaatcacgttcgtgatgtgccgggtgttaccttgggcctcgtaggtcctgatggacgcgagggcatgatccaaaatgccgaagaatttgctgctggtggcattccgttcatttttgacccaggtcaggcaatgccgctgttcaacggccccgaactgcgcgagtttatcgaacaggcggactatgtggtggtcaacgattacgaaagcaatcttcttcaagaacgtactggctggaacgagcaggacattgtttcacgcgtgcaggcgtatatcaccacgcaaggtcctaaaggagccctggtacatacaccggagaagacctacgatattccgccggcacacgaacgtcgtgtcgttgatccaactggttgcggcgacgcgtttcgcgccggcctgatctatggtattcagcataattatgattggttgaccattggccgcatgggaaacttaatgggtgcgctgaaagtggaacaccctggcacgcaaaatcagcgtttcgattttgccgaattcaacgaccagttcaaacaacagtttggctacgcgctc

SEQ ID NO: 268 - protein, 321 aa, synthetic construct
  REGION 1..321: note = Variant of adenosine kinase
MHHHHHHGGSGMSALICGSLAYDTIMVFPDQFKRHILPDKVHILNVSFLVPRMRREFGGCAGNIAYNLHLLGGAPIPMGTVGQDFGPYREHFETLGIDLSRVKIIDDLFTPQAFITTDHDHNQITAFHPGAMMRSYENHVRDVPGVTLGLVGPDGREGMIQNAEEFAAGGIPFIFDPGQAMPLFNGPELREFIEQADYVVVNDYESNLLQERTGWNEQDIVSRVQAYITTQGPKGALVHTPEKTYDIPPAHERRVVDPTGCGDAFRAGLIYGIQHNYDWLTIGRMGNLMGALKVEHPGTQNQRFDFAEFNDQFKQQFGYAL

SEQ ID NO: 269 - DNA, 963 bp, synthetic construct
  misc_feature 1..963: note = Variant of adenosine kinase
  source 1..963: mol_type = other DNA
atgcaccatcatcaccatcacgggggctccggcatgagtgcactgatttgcggttctttagcgtatgataccatcatggtgtttccggaccagttcaagaaccatattctgcccgataaggttcaccgcctcaatgtcagctttcttgtaccacgcatgcgtcgtgaatttggaggctgtgccggcaacattgcgtacaatctgcatctgttgggtggtgctccgatccctatgggaacggtgggccaagatttcggtccgtatcgcgagcacttcgaaactctgggcattgacttatcccgcgtcaagatcatcgatgatctgagtacaccgcaggccttcattaccaccgaccatgatcataaccagattacggcgtttcatccaggcgcaatgatgcgttcgtacgaaaatcacgttcgtgatgtgccgggtgttaccttgggcctcgtaggtcctgatggacgcgagggcatgatccaaaatgccgaagaatttgctgctggtggcattccgttcatttttgacccaggtcaggcaatgccgctgttcaacggccccgaactgcgcgagtttatcgaacaggcggactatgtggtggtcaacgattacgaaagcaatcttcttcaagaacgtactggctggaacgagcaggacattgtttcacgcgtgcaggcgtatatcaccacgcaaggtcctaaaggagccctggtacatacaccggagaagacctacgatattccgccggcacacgaacgtcgtgtcgttgatccaactggttgcggcgacgcgtttcgcgccggcctgatctatggtattcagcataattatgattggttgaccattggccgcatgggaaacttaatgggtgcgctgaaagtggaacaccctggcacgcaaaatcagcgtttcgattttgccgaattcaacgaccagttcaaacaaagctttggctacgcgctc

SEQ ID NO: 270 - protein, 321 aa, synthetic construct
  REGION 1..321: note = Variant of adenosine kinase
MHHHHHHGGSGMSALICGSLAYDTIMVFPDQFKNHILPDKVHRLNVSFLVPRMRREFGGCAGNIAYNLHLLGGAPIPMGTVGQDFGPYREHFETLGIDLSRVKIIDDLSTPQAFITTDHDHNQITAFHPGAMMRSYENHVRDVPGVTLGLVGPDGREGMIQNAEEFAAGGIPFIFDPGQAMPLFNGPELREFIEQADYVVVNDYESNLLQERTGWNEQDIVSRVQAYITTQGPKGALVHTPEKTYDIPPAHERRVVDPTGCGDAFRAGLIYGIQHNYDWLTIGRMGNLMGALKVEHPGTQNQRFDFAEFNDQFKQSFGYAL

SEQ ID NO: 271 - DNA, 963 bp, synthetic construct
  misc_feature 1..963: note = Variant of adenosine kinase
  source 1..963: mol_type = other DNA
atgcaccatcatcaccatcacgggggctccggcatgagtgcactgatttgcggttctttagcgtatgataccatcatggtgtttccggaccagttcaagaaacatattctgtgcgataaagttcacatcctcaatgtcagctttcttgtaccacgcatgcgtcgtgaatttggaggctgtgccggcaacattgcgtacaatctgcatctgttgggtggtgctccgatccctatgggaacggtgggccaagatttcggtccgtatcgcgagcacttcgaaactctgggcattgacttatcccgcgtcaagatcatcgatgatctgtttacaccgcaggccttcattatgaccgaccatgatcataaccagattacggcgtttcatccaggcgcaatgatgcgttcgtacgaaaatcacgttcgtgatgtgccgggtgttaccttgggcctcgtaggtcctgatggacgcgagggcatgatccaaaatgccgaagaatttgctgctggtggcattccgttcatttttgacccaggtcaggcaatgccgctgttcaacggccccgaactgcgcgagtttatcgaacaggcggactatgtggtggtcaacgattacgaaagcaatcttcttcaagaacgtactggctggaacgagcaggacattgtttcacgcgtgcaggcgtatatcaccacgcaaggtcctaaaggagccctggtacatacaccggagaagacctacgatattccgccggcacacgaacctcgtgtcgttgatccaactggttgcggcgacgcgtttcgcgccggcctgatctatggtattcagcataattatgattggttgaccattggccgcatgggaaacttaatgggtgcgctgaaagtggaacaccctggcacgcaaaatcagcgtttcgattttgccgaattcaacgaccagttcaaacaacagtttggctacgcgctc

SEQ ID NO: 272 - protein, 321 aa, synthetic construct
  REGION 1..321: note = Variant of adenosine kinase
MHHHHHHGGSGMSALICGSLAYDTIMVFPDQFKKHILCDKVHILNVSFLVPRMRREFGGCAGNIAYNLHLLGGAPIPMGTVGQDFGPYREHFETLGIDLSRVKIIDDLFTPQAFIMTDHDHNQITAFHPGAMMRSYENHVRDVPGVTLGLVGPDGREGMIQNAEEFAAGGIPFIFDPGQAMPLFNGPELREFIEQADYVVVNDYESNLLQERTGWNEQDIVSRVQAYITTQGPKGALVHTPEKTYDIPPAHEPRVVDPTGCGDAFRAGLIYGIQHNYDWLTIGRMGNLMGALKVEHPGTQNQRFDFAEFNDQFKQQFGYAL

SEQ ID NO: 273 - DNA, 963 bp, synthetic construct
  misc_feature 1..963: note = Variant of adenosine kinase
  source 1..963: mol_type = other DNA
atgcaccatcatcaccatcacgggggctccggcatgagtgcactgatttgcggttctttagcgtatgataccatcatggtgtttccggaccagttcaagaaccatattctgcctgataaagttcacatcctcaatgtcagctttcttgtaccacgcatgcgtcgtgaatttggaggctgtgccggcaacattgcgtacaatctgcatctgttgggtggtgctccgatccctatgggaacggtgggccaagatttcggtccgtatcgcgagcacttcgaaactctgggcattgacttatcccgcgtcaagatcatcgatgatctgtttacaccgcaggccttcattaccaccgaccatgatcataaccagattacggcgtttcatccaggcgcaatgatgcgttcgtacgaaaatcacgttcgtgatgtgccgggtgttaccttgggcctcgtaggtcctgatggacgcgagggcatgatccaaaatgccgaagaatttgctgctggtggcattccgttcatttttgacccaggtcaggcaatgccgctgttcaacggccccgaactgcgcgagtttatcgaacaggcggactatgtggtggtcaacgattacgaaagcaatctgcttcaggaacgtactggctggaacgagcaggacattgtttcacgcgtgcaggcgtatatcaccacgcaaggtcctaaaggagccctggtacatacaccggagaagacctacgatattcctccggcacacgaacctcgtgtcgttgatccaactggttgcggcgacgcgtttcgcgccggcctgatctatggtattcagcataattatgattggttgaccattggccgcatgggaaacttaatgggtgcgctgaaagtggaacaccctggcacgcaaaatcagcgtttcgattttgccttcttcaacgaccagttcaaacaacagtttggctacgcgctc

SEQ ID NO: 274 - protein, 321 aa, synthetic construct
  REGION 1..321: note = Variant of adenosine kinase
MHHHHHHGGSGMSALICGSLAYDTIMVFPDQFKNHILPDKVHILNVSFLVPRMRREFGGCAGNIAYNLHLLGGAPIPMGTVGQDFGPYREHFETLGIDLSRVKIIDDLFTPQAFITTDHDHNQITAFHPGAMMRSYENHVRDVPGVTLGLVGPDGREGMIQNAEEFAAGGIPFIFDPGQAMPLFNGPELREFIEQADYVVVNDYESNLLQERTGWNEQDIVSRVQAYITTQGPKGALVHTPEKTYDIPPAHEPRVVDPTGCGDAFRAGLIYGIQHNYDWLTIGRMGNLMGALKVEHPGTQNQRFDFAFFNDQFKQQFGYAL

SEQ ID NO: 275 - DNA, 963 bp, synthetic construct
  misc_feature 1..963: note = Variant of adenosine kinase
  source 1..963: mol_type = other DNA
atgcaccatcatcaccatcacgggggctccggcatgagtgcactgatttgcggttctttagcgtatgataccatcatggtgtttccggaccagttcaagcgtcatattctgcctgataaagttcacatcctcaatgtcagctttcttgtaccacgcatgcgtcgtgaatttggaggctgtgccggcaacattgcgtacaatctgcatctgttgggtggtgctccgatccctatgggaacggtgggccaagatttcggtccgtatcgcgagcacttcgaaactctgggcattgacttatcccgcgtccgtatcatcgatgatctgtttacaccgcaggccttcattatgaccgaccatgatcataaccagattacggcgtttcatccaggcgcaatgatgcgttcgtacgaaaatcacgttcgtgatgtgccgggtgttaccttgggcctcgtaggtcctgatggacgcgagggcatgatccaaaatgccgaagaatttgctgctggtggcattccgttcatttttgacccaggtcaggcaatgccgctgttcaacggccccgaactgcgcgagtttatcgaacaggcggactatgtggtggtcaacgattacgaaagcaatgtgcttcaggaacgtactggctggaacgagcaggacattgtttcacgcgtgcaggcgtatatcaccacgcaaggtcctaaaggagccctggtacatacaccggagaagacctacgatattcgtccggcacacgaacctcgtgtcgttgatccaactggttgcggcgacgcgtttcgcgccggcctgatctatggtattcagcataattatgattggttgaccattggccgcatgggaaacttaatgggtgcgctgaaagtggaacaccctggcacgcaaaatcagcgtttcgattttgccgaattcaacgaccagttcaaacaacagtttggctacgcgctc

SEQ ID NO: 276 - protein, 321 aa, synthetic construct
  REGION 1..321: note = Variant of adenosine kinase
MHHHHHHGGSGMSALICGSLAYDTIMVFPDQFKRHILPDKVHILNVSFLVPRMRREFGGCAGNIAYNLHLLGGAPIPMGTVGQDFGPYREHFETLGIDLSRVRIIDDLFTPQAFIMTDHDHNQITAFHPGAMMRSYENHVRDVPGVTLGLVGPDGREGMIQNAEEFAAGGIPFIFDPGQAMPLFNGPELREFIEQADYVVVNDYESNVLQERTGWNEQDIVSRVQAYITTQGPKGALVHTPEKTYDIRPAHEPRVVDPTGCGDAFRAGLIYGIQHNYDWLTIGRMGNLMGALKVEHPGTQNQRFDFAEFNDQFKQQFGYAL

SEQ ID NO: 277 - DNA, 963 bp, synthetic construct
  misc_feature 1..963: note = Variant of adenosine kinase
  source 1..963: mol_type = other DNA
atgcaccatcatcaccatcacgggggctccggcatgagtgcactgatttgcggttctttagcgtatgataccatcatggtgtttccggaccagttcaagaaccatattctgcctgataaagttcacatcctcaatgtcagctttcttgtaccacgcatgcgtcgtgaatttggaggctgtgccggcaacattgcgtacaatctgcatctgttgggtggtgctccgatccctatgggaacggtgggccaagatttcggtccgtatcgcgagcacttcgaaactctgggcattgacttatcccgcgtcaagatcatcgatgatctgtttacaccgcaggccttcattatgaccgaccatgatcataaccagattacggcgtttcatccaggcgcaatgatgcgttcgtacgaaaatcacgttcgtgatgtgccgggtgttaccttgggcctcgtaggtcctgatggacgcgagggcatgatccaaaatgccgaagaatttgctgctggtggcattccgttcatttttgacccaggtcaggcaatgccgctgttcaacggccccgaactgcgcgagtttatcgaacaggcggactatgtggtggtcaacgattacgaaagcaatcttcttcaagaacgtactggctggaacgagcaggacattgtttcacgcgtgcaggcgtatatcaccacgcaaggtcctaaaggagccctggtacatacaccggagaagacctacgatattccgccggcacacgaacctcgtgtcgttgatccaactggttgcggcgacgcgtttcgcgccggcctgatctatggtattcagcataattatgattggttgaccattggccgcatgggaaacttaatgggtgcgctgaaagtggaacaccctggcacgcaaaatcagcgtttcgattttgccgagttcaacgaccagttcaaacaacagtttggctacgcgctc

SEQ ID NO: 278 - protein, 321 aa, synthetic construct
  REGION 1..321: note = Variant of adenosine kinase
MHHHHHHGGSGMSALICGSLAYDTIMVFPDQFKNHILPDKVHILNVSFLVPRMRREFGGCAGNIAYNLHLLGGAPIPMGTVGQDFGPYREHFETLGIDLSRVKIIDDLFTPQAFIMTDHDHNQITAFHPGAMMRSYENHVRDVPGVTLGLVGPDGREGMIQNAEEFAAGGIPFIFDPGQAMPLFNGPELREFIEQADYVVVNDYESNLLQERTGWNEQDIVSRVQAYITTQGPKGALVHTPEKTYDIPPAHEPRVVDPTGCGDAFRAGLIYGIQHNYDWLTIGRMGNLMGALKVEHPGTQNQRFDFAEFNDQFKQQFGYAL

SEQ ID NO: 279 - DNA, 963 bp, synthetic construct
  misc_feature 1..963: note = Variant of adenosine kinase
  source 1..963: mol_type = other DNA
atgcaccatcatcaccatcacgggggctccggcatgagtgcactgatttgcggttctttagcgtatgataccatcatggtgtttccggaccagttcaagaaccatattctgcccgataaagttcacatcctcaatgtcagctttcttgtaccacgcatgcgtcgtgaatttggaggctgtgccggcaacattgcgtacaatctgcatctgttgggtggtgctccgatccctatgggaacggtgggccaagatttcggtccgtatcgcgagcacttcgaaactctgggcattgacttatcccgcgtcaagatcatcgatgatctgagtacagcgcaggccttcattaccaccgaccatgatcataaccagattacggcgtttcatccaggcgcaatgatgcgttcgtacgaaaatcacgttcgtgatgtgccgggtgttaccttgggcctcgtaggtcctgatggacgcgagggcatgatccaaaatgccgaagaatttgctgctggtggcattccgttcatttttgacccaggtcaggcaatgccgctgttcaacggccccgaactgcgcgagtttatcgaacaggcggactatgtggtggtcaacgattacgaaagcaatcttcttcaagaacgtactggctggaacgagcaggacattgtttcacgcgtgcaggcgtatatcaccacgcaaggttcgaaaggagccctggtacatacaccggagaagacctacgatattccgccggcacacgaacgtcgtgtcgttgatccaactggttgcggcgacgcgtttcgcgccggcctgatctatggtattcagcataattatgattggttgaccattggccgcatgggaaacttaatgggtgcgctgaaagtggaacaccctggcacgcaaaatcagcgtttcgattttgccgaattcaacgaccagttcaaacaagattttggctacgcgctc

SEQ ID NO: 280 - protein, 321 aa, synthetic construct
  REGION 1..321: note = Variant of adenosine kinase
MHHHHHHGGSGMSALICGSLAYDTIMVFPDQFKNHILPDKVHILNVSFLVPRMRREFGGCAGNIAYNLHLLGGAPIPMGTVGQDFGPYREHFETLGIDLSRVKIIDDLSTAQAFITTDHDHNQITAFHPGAMMRSYENHVRDVPGVTLGLVGPDGREGMIQNAEEFAAGGIPFIFDPGQAMPLFNGPELREFIEQADYVVVNDYESNLLQERTGWNEQDIVSRVQAYITTQGSKGALVHTPEKTYDIPPAHERRVVDPTGCGDAFRAGLIYGIQHNYDWLTIGRMGNLMGALKVEHPGTQNQRFDFAEFNDQFKQDFGYAL

SEQ ID NO: 281 - DNA, 963 bp, synthetic construct
  misc_feature 1..963: note = Variant of adenosine kinase
  source 1..963: mol_type = other DNA
atgcaccatcatcaccatcacgggggctccggcatgagtgcactgatttgcggttctttagcgtatgataccatcatggtgtttccggaccagttcaagaaccatattctgcccgataaagttcaccgcctcaatgtcagctttcttgtaccacgcatgcgtcgtgaatttggaggctgtgccggcaacattgcgtacaatctgcatctgttgggtggtgctccgatccctatgggaacggtgggccaagatttcggtccgtatcgcgagcacttcgaaactctgggcattgacttatcccgcgtcaagatcatcgatgatctgttcacagcgcaggccttcattaccaccgaccatgatcataaccagattacggcgtttcatccaggggcaatgatgcgttcgtacgaaaatcacgttcgtgatgtgccgggtgttaccttgggcctcgtaggtcctgatggacgcgagggcatgatccaaaatgccgaagaatttgctgctggtggcattccgttcatttttgacccaggtcaggcactgccgctgttcaacggccccgaactgcgcgagtttatcgaacaggcggactatgtggtggtcaacgattacgaaagcaatcttcttcaagaacgtactggctggaacgagcaggacattgtttcacgcgtgcaggcgtatatcaccacgcaaggtcctaaaggagccctggtacatacaccggagaagacctacgatattccgccggcacacgaacgtcgtgtcgttgatccaactggttgcggcgacgcgtttcgcgccggcctgatctatggtattcagcataattatgattggttgaccattggccgcatgggaaacttaatgggtgcgctgaaagtggaacaccctggcacgcaaaatcagcgtttcgattttgccgaattcaacgaccagttcaaacaagaatttggctacgcgctc

SEQ ID NO: 282 - protein, 321 aa, synthetic construct
  REGION 1..321: note = Variant of adenosine kinase
MHHHHHHGGSGMSALICGSLAYDTIMVFPDQFKNHILPDKVHRLNVSFLVPRMRREFGGCAGNIAYNLHLLGGAPIPMGTVGQDFGPYREHFETLGIDLSRVKIIDDLFTAQAFITTDHDHNQITAFHPGAMMRSYENHVRDVPGVTLGLVGPDGREGMIQNAEEFAAGGIPFIFDPGQALPLFNGPELREFIEQADYVVVNDYESNLLQERTGWNEQDIVSRVQAYITTQGPKGALVHTPEKTYDIPPAHERRVVDPTGCGDAFRAGLIYGIQHNYDWLTIGRMGNLMGALKVEHPGTQNQRFDFAEFNDQFKQEFGYAL

SEQ ID NO: 283 - DNA, 963 bp, synthetic construct
  misc_feature 1..963: note = Variant of adenosine kinase
  source 1..963: mol_type = other DNA
atgcaccatcatcaccatcacgggggctccggcatgagtgcactgatttgcggttctttagcgtatgataccatcatggtgtttccggaccagttcaagcgtcatattctgcctgataaagttcacatcctcaatgtcagctttcttgtaccacgcatgcgtcgtgaatttggaggctgtgccggcaacattgcgtacaatctgcatctgttgggtggtgctccgatccctatgggaacggtgggccaagatttcggtccgtatcgcgagcacttcgaaactctgggcattgacttatcccgcgtcaagatcatcgatgatctgtttacaccgcaggccttcattaccaccgaccatgatcataaccagattacggcgtttcatccaggcgcaatgatgcgttcgtacgaaaatcacgttcgtgatgtgccgggtgttaccttgggcctcgtaggtcctgatggacgcgagggcatgatccaaaatgccgaagaatttgctgctggtggcattccgttcatttttgacccaggtcaggcaatgccgctgttcaacggccccgaactgcgcgagtttatcgaacaggcggactatgtggtggtcaacgattacgaaagcaatgtgcttcagacccgtactggctggaacgagcaggacattgtttcacgcgtgcaggcgtatatcaccacgcaaggtcctaaaggagccctggtacatacaccggagaagacctacgatattcgtggtgcacacgaacgtcgtgtcgttgatccaactggttgcggcgacgcgtttcgcgccggcctgatctatggtattcagcataattatgattggttgaccattggccgcatgggaaacttaatgggtgcgctgaaagtggaacaccctggcacgcaaaatcagcgtttcgattttgccgaattcaacgaccagttcaaacaacagtttggctacgcgctc

SEQ ID NO: 284 - protein, 321 aa, synthetic construct
  REGION 1..321: note = Variant of adenosine kinase
MHHHHHHGGSGMSALICGSLAYDTIMVFPDQFKRHILPDKVHILNVSFLVPRMRREFGGCAGNIAYNLHLLGGAPIPMGTVGQDFGPYREHFETLGIDLSRVKIIDDLFTPQAFITTDHDHNQITAFHPGAMMRSYENHVRDVPGVTLGLVGPDGREGMIQNAEEFAAGGIPFIFDPGQAMPLFNGPELREFIEQADYVVVNDYESNVLQTRTGWNEQDIVSRVQAYITTQGPKGALVHTPEKTYDIRGAHERRVVDPTGCGDAFRAGLIYGIQHNYDWLTIGRMGNLMGALKVEHPGTQNQRFDFAEFNDQFKQQFGYAL

SEQ ID NO: 285 - DNA, 963 bp, synthetic construct
  misc_feature 1..963: note = Variant of adenosine kinase
  source 1..963: mol_type = other DNA
atgcaccatcatcaccatcacgggggctccggcatgagtgcactgatttgcggttctttagcgtatgataccatcatggtgtttccggaccagttcaagaaccatattctgcccgatcgtgttcacatcctcaatgtcagctttcttgtaccacgcatgcgtcgtgaatttggaggctgtgccggcaacattgcgtacaatctgcatctgttgggtggtgctccgatccctatgggaacggtgggccaagatttcggtccgtatcgcgagcacttcgaaactctgggcattgacttatcccgcgtcaagatcatcgatgatctgagtacagcgcaggccttcattaccaccgaccatgatcataaccagattacggcgtttcatccaggggcaatgatgcgttcgtacgaaaatcacgttcgtgatgtgccgggtgttaccttgggcctcgtaggtcctgatggacgcgagggcatgatccaaaatgccgaagaatttgctgctggtggcattccgttcatttttgacccaggtcaggcaatgccgctgttcaacggccccgaactgcgcgagtttatcgaacaggcggactatgtggtggtcaacgattacgaaagcaatcttcttcaagaacgtactggctggaacgagcaggacattgtttcacgcgtgcaggcgtatatcaccacgcaaggtcctaaaggagccctggtacatacaccggagaagacctacgatattccgccggcacacgaacgtcgtgtcgttgatccaactggttgcggcgacgcgtttcgcgccggcctgatctatggtattcagcataattatgattggttgaccattggccgcatgggaaacttaatgggtgcgctgaaagtggaacaccctggcacgcaaaatcagcgtttcgattttgccgaattcaacgaccagttcaaacaagaatttggctacgcgctc

SEQ ID NO: 286 - protein, 321 aa, synthetic construct
  REGION 1..321: note = Variant of adenosine kinase
MHHHHHHGGSGMSALICGSLAYDTIMVFPDQFKNHILPDRVHILNVSFLVPRMRREFGGCAGNIAYNLHLLGGAPIPMGTVGQDFGPYREHFETLGIDLSRVKIIDDLSTAQAFITTDHDHNQITAFHPGAMMRSYENHVRDVPGVTLGLVGPDGREGMIQNAEEFAAGGIPFIFDPGQAMPLFNGPELREFIEQADYVVVNDYESNLLQERTGWNEQDIVSRVQAYITTQGPKGALVHTPEKTYDIPPAHERRVVDPTGCGDAFRAGLIYGIQHNYDWLTIGRMGNLMGALKVEHPGTQNQRFDFAEFNDQFKQEFGYAL

SEQ ID NO: 287 - DNA, 963 bp, synthetic construct
  misc_feature 1..963: note = Variant of adenosine kinase
  source 1..963: mol_type = other DNA
atgcaccatcatcaccatcacgggggctccggcatgagtgcactgatttgcggttctttagcgtatgataccatcatggtgtttccggaccagttcaagcgtcatattctgtgcgataaagttcacatcctcaatgtcagctttcttgtaccacgcatgcgtcgtgaatttggaggctgtgccggcaacattgcgtacaatctgcatctgttgggtggtgctccgatccctatgggaacggtgggccaagatttcggtccgtatcgcgagcacttcgaaactctgggcattgacttatcccgcgtcaagatcatcgatgatctgtttacaccgcaggccttcattaccaccgaccatgatcataaccagattacggcgtttcatccaggcgcaatgatgcgttcgtacgaaaatcacgttcgtgatgtgccgggtgttaccttgggcctcgtaggtcctgatggacgcgagggcatgatccaaaatgccgaagaatttgctgctggtggcattccgttcatttttgacccaggtcaggcaatgccgctgttcaacggccccgaactgcgcgagtttatcgaacaggcggactatgtggtggtcaacgattacgaaagcaatcttcttcaagaacgtactggctggaacgagcaggacattgtttcacgcgtgcaggcgtatatcaccacgcaaggtcctaaaggagccctggtacatacaccggagaagacctacgatattccgccggcacacgaacgtcgtgtcgttgatccaactggttgcggcgacgcgtttcgcgccggcctgatctatggtattcagcataattatgattggttgaccattggccgcatgggaaacttaatgggtgcgctgaaagtggaacaccctggcacgcaaaatcagcgtttcgattttgccttcttcaacgaccagttcaaacaacagtttggctacgcgctc

SEQ ID NO: 288 - protein, 321 aa, synthetic construct
  REGION 1..321: note = Variant of adenosine kinase
MHHHHHHGGSGMSALICGSLAYDTIMVFPDQFKRHILCDKVHILNVSFLVPRMRREFGGCAGNIAYNLHLLGGAPIPMGTVGQDFGPYREHFETLGIDLSRVKIIDDLFTPQAFITTDHDHNQITAFHPGAMMRSYENHVRDVPGVTLGLVGPDGREGMIQNAEEFAAGGIPFIFDPGQAMPLFNGPELREFIEQADYVVVNDYESNLLQERTGWNEQDIVSRVQAYITTQGPKGALVHTPEKTYDIPPAHERRVVDPTGCGDAFRAGLIYGIQHNYDWLTIGRMGNLMGALKVEHPGTQNQRFDFAFFNDQFKQQFGYAL

SEQ ID NO: 289 - DNA, 963 bp, synthetic construct
  misc_feature 1..963: note = Variant of adenosine kinase
  source 1..963: mol_type = other DNA
atgcaccatcatcaccatcacgggggctccggcatgagtgcactgatttgcggttctttagcgtatgataccatcatggtgtttccggaccagttcaagaaccatattctgcccgataaagttcacatcctcaatgtcagctttcttgtaccacgcatgcgtcgtgaatttggaggctgtgccggcaacattgcgtacaatctgcatctgttgggtggtgctccgatccctatgggaacggtgggccaagatttcggtccgtatcgcgagcacttcgaaactctgggcattgacttatcccgcgtcaagatcatcgatgatctgagtacagcgcaggccttcattaccaccgaccatgatcataaccagattacggcgtttcatccaggggcaatgatgcgttcgtacgaaaatcacgttcgtgatgtgccgggtgttaccttgggcctcgtaggtcctgatggacgcgagggcatgatccaaaatgccgaagaatttgctgctggtggcattccgttcatttttgacccaggtcaggcactgccgctgttcaacggccccgaactgcgcgagtttatcgaacaggcggactatgtggtggtcaacgattacgaaagcaatcttcttcaagaacgtactggctggaacgagcaggacattgtttcacgcgtgcaggcgtatatcaccacgcaaggtccgaaaggagccctggtacatacaccggagaagacctacgatattccgccggcacacgaacgtcgtgtcgttgatccaactggttgcggcgacgcgtttcgcgccggcctgatctatggtattcagcataattatgattggttgaccattggccgcatgggaaacttaatgggtgcgctgaaagtggaacaccctggcacgcaaaatcagcgtttcgattttgccgaattcaacgaccagttcaaacaacagtttggctacgcgctc

SEQ ID NO: 290 - protein, 321 aa, synthetic construct
  REGION 1..321: note = Variant of adenosine kinase
MHHHHHHGGSGMSALICGSLAYDTIMVFPDQFKNHILPDKVHILNVSFLVPRMRREFGGCAGNIAYNLHLLGGAPIPMGTVGQDFGPYREHFETLGIDLSRVKIIDDLSTAQAFITTDHDHNQITAFHPGAMMRSYENHVRDVPGVTLGLVGPDGREGMIQNAEEFAAGGIPFIFDPGQALPLFNGPELREFIEQADYVVVNDYESNLLQERTGWNEQDIVSRVQAYITTQGPKGALVHTPEKTYDIPPAHERRVVDPTGCGDAFRAGLIYGIQHNYDWLTIGRMGNLMGALKVEHPGTQNQRFDFAEFNDQFKQQFGYAL

SEQ ID NO: 291 - DNA, 963 bp, synthetic construct
  misc_feature 1..963: note = Variant of adenosine kinase
  source 1..963: mol_type = other DNA
atgcaccatcatcaccatcacgggggctccggcatgagtgcactgatttgcggttctttagcgtatgataccatcatggtgtttccggaccagttcaagaaccatattctgcccgataaagttcacatcctcaatgtcagctttcttgtaccacgcatgcgtcgtgaatttggaggctgtgccggcaacattgcgtacaatctgcatctgttgggtggtgctccgatccctatgggaacggtgggccaagatttcggtccgtatcgcgagcacttcgaaactctgggcattgacttatcccgcgtcaagatcatcgatgatctgttcacagcgcaggccttcattaccaccgaccatgatcataaccagattacggcgtttcatccagcggcaatgatgcgttcgtacgaaaatcacgttcgtgatgtgccgggtgttaccttgggcctcgtaggtcctgatggacgcgagggcatgatccaaaatgccgaagaatttgctgctggtggcattccgttcatttttgacccaggtcaggcaatgccgctgttcaacggccccgaactgcgcgagtttatcgaacaggcggactatgtggtggtcaacgattacgaaagcaatcttcttcaagaacgtactggctggaacgagcaggacattgtttcacgcgtgcaggcgtatatcaccacgcaaggttcgaaaggagccctggtacatacaccggagaagacctacgatattccgccggcacacgaacgtcgtgtcgttgatccaactggttgcggcgacgcgtttcgcgccggcctgatctatggtattcagcataattatgattggttgaccattggccgcatgggaaacttaatgggtgcgctgaaagtggaacaccctggcacgcaaaatcagcgtttcgattttgccgaattcaacgaccagttcaaacaacagtttggctacgcgctc

SEQ ID NO: 292 - protein, 321 aa, synthetic construct
  REGION 1..321: note = Variant of adenosine kinase
MHHHHHHGGSGMSALICGSLAYDTIMVFPDQFKNHILPDKVHILNVSFLVPRMRREFGGCAGNIAYNLHLLGGAPIPMGTVGQDFGPYREHFETLGIDLSRVKIIDDLFTAQAFITTDHDHNQITAFHPAAMMRSYENHVRDVPGVTLGLVGPDGREGMIQNAEEFAAGGIPFIFDPGQAMPLFNGPELREFIEQADYVVVNDYESNLLQERTGWNEQDIVSRVQAYITTQGSKGALVHTPEKTYDIPPAHERRVVDPTGCGDAFRAGLIYGIQHNYDWLTIGRMGNLMGALKVEHPGTQNQRFDFAEFNDQFKQQFGYAL

SEQ ID NO: 293 - DNA, 963 bp, synthetic construct
  misc_feature 1..963: note = Variant of adenosine kinase
  source 1..963: mol_type = other DNA
atgcaccatcatcaccatcacgggggctccggcatgagtgcactgatttgcggttctttagcgtatgataccatcatggtgtttccggaccagttcaagaaccatattctgcccgataaggttcacatcctcaatgtcagctttcttgtaccacgcatgcgtcgtgaatttggaggctgtgccggcaacattgcgtacaatctgcatctgttgggtggtgctccgatccctatgggaacggtgggccaagatttcggtccgtatcgcgagcacttcgaaactctgggcattgacttatcccgcgtcaagatcatcgatgatctgtttacaccgcaggccttcattaccaccgaccatgatcataaccagattacggcgtttcatccaggggcaatgatgcgttcgtacgaaaatcacgttcgtgatgtgccgggtgttaccttgggcctcgtaggtcctgatggacgcgagggcatgatccaaaatgccgaagaatttgctgctggtggcattccgttcatttttgacccaggtcaggcaatgccgctgttcaacggccccgaactgcgcgagtttatcgaacaggcggactatgtggtggtcaacgattacgaaagcaatcttcttcaagaacgtactggctggaacgagcaggacattgtttcacgcgtgcaggcgtatatcaccacgcaaggttcgaaaggagccctggtacatacaccggagaagacctacgatattccgccggcacacgaacgtcgtgtcgttgatccaactggttgcggcgacgcgtttcgcgccggcctgatctatggtattcagcataattatgattggttgaccattggccgcatgggaaacttaatgggtgcgctgaaagtggaacaccctggcacgcaaaatcagcgtttcgattttgccgaattcaacgaccagttcaaacaacagtttggctacgcgctc

SEQ ID NO: 294 - protein, 321 aa, synthetic construct
  REGION 1..321: note = Variant of adenosine kinase
MHHHHHHGGSGMSALICGSLAYDTIMVFPDQFKNHILPDKVHILNVSFLVPRMRREFGGCAGNIAYNLHLLGGAPIPMGTVGQDFGPYREHFETLGIDLSRVKIIDDLFTPQAFITTDHDHNQITAFHPGAMMRSYENHVRDVPGVTLGLVGPDGREGMIQNAEEFAAGGIPFIFDPGQAMPLFNGPELREFIEQADYVVVNDYESNLLQERTGWNEQDIVSRVQAYITTQGSKGALVHTPEKTYDIPPAHERRVVDPTGCGDAFRAGLIYGIQHNYDWLTIGRMGNLMGALKVEHPGTQNQRFDFAEFNDQFKQQFGYAL

SEQ ID NO: 295 - DNA, 963 bp, synthetic construct
  misc_feature 1..963: note = Variant of adenosine kinase
  source 1..963: mol_type = other DNA
atgcaccatcatcaccatcacgggggctccggcatgagtgcactgatttgcggttctttagcgtatgataccatcatggtgtttccggaccagttcaagcgtcatattctgtgcgataaagttcacatcctcaatgtcagctttcttgtaccacgcatgcgtcgtgaatttggaggctgtgccggcaacattgcgtacaatctgcatctgttgggtggtgctccgatccctatgggaacggtgggccaagatttcggtccgtatcgcgagcacttcgaaactctgggcattgacttatcccgcgtcaagatcatcgatgatctgtttacaccgcaggccttcattatgaccgaccatgatcataaccagattacggcgtttcatccaggcgcaatgatgcgttcgtacgaaaatcacgttcgtgatgtgccgggtgttaccttgggcctcgtaggtcctgatggacgcgagggcatgatccaaaatgccgaagaatttgctgctggtggcattccgttcatttttgacccaggtcaggcaatgccgctgttcaacggccccgaactgcgcgagtttatcgaacaggcggactatgtggtggtcaacgattacgaaagcaatctgcttcaggaacgtactggctggaacgagcaggacattgtttcacgcgtgcaggcgtatatcaccacgcaaggtcctaaaggagccctggtacatacaccggagaagacctacgatattccgccggcacacgaacgtcgtgtcgttgatccaactggttgcggcgacgcgtttcgcgccggcctgatctatggtattcagcataattatgattggttgaccattggccgcatgggaaacttaatgggtgcgctgaaagtggaacaccctggcacgcaaaatcagcgtttcgattttgccttcttcaacgaccagttcaaacaacagtttggctacgcgctc

SEQ ID NO: 296 - protein, 321 aa, synthetic construct
  REGION 1..321: note = Variant of adenosine kinase
MHHHHHHGGSGMSALICGSLAYDTIMVFPDQFKRHILCDKVHILNVSFLVPRMRREFGGCAGNIAYNLHLLGGAPIPMGTVGQDFGPYREHFETLGIDLSRVKIIDDLFTPQAFIMTDHDHNQITAFHPGAMMRSYENHVRDVPGVTLGLVGPDGREGMIQNAEEFAAGGIPFIFDPGQAMPLFNGPELREFIEQADYVVVNDYESNLLQERTGWNEQDIVSRVQAYITTQGPKGALVHTPEKTYDIPPAHERRVVDPTGCGDAFRAGLIYGIQHNYDWLTIGRMGNLMGALKVEHPGTQNQRFDFAFFNDQFKQQFGYAL

SEQ ID NO: 297 - DNA, 963 bp, synthetic construct
  misc_feature 1..963: note = Variant of adenosine kinase
  source 1..963: mol_type = other DNA
atgcaccatcatcaccatcacgggggctccggcatgagtgcactgatttgcggttctttagcgtatgataccatcatggtgtttccggaccagttcaagaaccatattctgcccgataaggttcacatcctcaatgtcagctttcttgtaccacgcatgcgtcgtgaatttggaggctgtgccggcaacattgcgtacaatctgcatctgttgggtggtgctccgatccctatgggaacggtgggccaagatttcggtccgtatcgcgagcacttcgaaactctgggcattgacttatcccgcgtcaagatcatcgatgatctgagtacaccgcaggccttcattaccaccgaccatgatcataaccagattacggcgtttcatccaggcgcaatgatgcgttcgtacgaaaatcacgttcgtgatgtgccgggtgttaccttgggcctcgtaggtcctgatggacgcgagggcatgatccaaaatgccgaagaatttgctgctggtggcattccgttcatttttgacccaggtcaggcaatgccgctgttcaacggccccgaactgcgcgagtttatcgaacaggcggactatgtggtggtcaacgattacgaaagcaatcttcttcaagaacgtactggctggaacgagcaggacattgtttcacgcgtgcaggcgtatatcaccacgcaaggttcgaaaggagccctggtacatacaccggagaagacctacgatattccgccggcacacgaacgtcgtgtcgttgatccaactggttgcggcgacgcgtttcgcgccggcctgatctatggtattcagcataattatgattggttgaccattggccgcatgggaaacttaatgggtgcgctgaaagtggaacaccctggcacgcaaaatcagcgtttcgattttgccgaattcaacgaccagttcaaacaacagtttggctacgcgctc

SEQ ID NO: 298 - protein, 321 aa, synthetic construct
  REGION 1..321: note = Variant of adenosine kinase
MHHHHHHGGSGMSALICGSLAYDTIMVFPDQFKNHILPDKVHILNVSFLVPRMRREFGGCAGNIAYNLHLLGGAPIPMGTVGQDFGPYREHFETLGIDLSRVKIIDDLSTPQAFITTDHDHNQITAFHPGAMMRSYENHVRDVPGVTLGLVGPDGREGMIQNAEEFAAGGIPFIFDPGQAMPLFNGPELREFIEQADYVVVNDYESNLLQERTGWNEQDIVSRVQAYITTQGSKGALVHTPEKTYDIPPAHERRVVDPTGCGDAFRAGLIYGIQHNYDWLTIGRMGNLMGALKVEHPGTQNQRFDFAEFNDQFKQQFGYAL

SEQ ID NO: 299 - DNA, 963 bp, synthetic construct
  misc_feature 1..963: note = Variant of adenosine kinase
  source 1..963: mol_type = other DNA
atgcaccatcatcaccatcacgggggctccggcatgagtgcactgatttgcggttctttagcgtatgataccatcatggtgtttccggaccagttcaagaaccatattctgcccgatcgtgttcaccgcctcaatgtcagctttcttgtaccacgcatgcgtcgtgaatttggaggctgtgccggcaacattgcgtacaatctgcatctgttgggtggtgctccgatccctatgggaacggtgggccaagatttcggtccgtatcgcgagcacttcgaaactctgggcattgacttatcccgcgtcaagatcatcgatgatctgagtacagcgcaggccttcattaccaccgaccatgatcataaccagattacggcgtttcatccaggggcaatgatgcgttcgtacgaaaatcacgttcgtgatgtgccgggtgttaccttgggcctcgtaggtcctgatggacgcgagggcatgatccaaaatgccgaagaatttgctgctggtggcattccgttcatttttgacccaggtcaggcactgccgctgttcaacggccccgaactgcgcgagtttatcgaacaggcggactatgtggtggtcaacgattacgaaagcaatcttcttcaagaacgtactggctggaacgagcaggacattgtttcacgcgtgcaggcgtatatcaccacgcaaggttcgaaaggagccctggtacatacaccggagaagacctacgatattccgccggcacacgaacgtcgtgtcgttgatccaactggttgcggcgacgcgtttcgcgccggcctgatctatggtattcagcataattatgattggttgaccattggccgcatgggaaacttaatgggtgcgctgaaagtggaacaccctggcacgcaaaatcagcgtttcgattttgccgaattcaacgaccagttcaaacaaagctttggctacgcgctc

SEQ ID NO: 300 - protein, 321 aa, synthetic construct
  REGION 1..321: note = Variant of adenosine kinase
MHHHHHHGGSGMSALICGSLAYDTIMVFPDQFKNHILPDRVHRLNVSFLVPRMRREFGGCAGNIAYNLHLLGGAPIPMGTVGQDFGPYREHFETLGIDLSRVKIIDDLSTAQAFITTDHDHNQITAFHPGAMMRSYENHVRDVPGVTLGLVGPDGREGMIQNAEEFAAGGIPFIFDPGQALPLFNGPELREFIEQADYVVVNDYESNLLQERTGWNEQDIVSRVQAYITTQGSKGALVHTPEKTYDIPPAHERRVVDPTGCGDAFRAGLIYGIQHNYDWLTIGRMGNLMGALKVEHPGTQNQRFDFAEFNDQFKQSFGYAL

SEQ ID NO: 301 - DNA, 963 bp, synthetic construct
  misc_feature 1..963: note = Variant of adenosine kinase
  source 1..963: mol_type = other DNA
atgcaccatcatcaccatcacgggggctccggcatgagtgcactgatttgcggttctttagcgtatgataccatcatggtgtttccggaccagttcaagaaccatattctgcccgataaagttcacatcctcaatgtcagctttcttgtaccacgcatgcgtcgtgaatttggaggctgtgccggcaacattgcgtacaatctgcatctgttgggtggtgctccgatccctatgggaacggtgggccaagatttcggtccgtatcgcgagcacttcgaaactctgggcattgacttatcccgcgtcaagatcatcgatgatctgagtacaccgcaggccttcattaccaccgaccatgatcataaccagattacggcgtttcatccagcggcaatgatgcgttcgtacgaaaatcacgttcgtgatgtgccgggtgttaccttgggcctcgtaggtcctgatggacgcgagggcatgatccaaaatgccgaagaatttgctgctggtggcattccgttcatttttgacccaggtcaggcactgccgctgttcaacggccccgaactgcgcgagtttatcgaacaggcggactatgtggtggtcaacgattacgaaagcaatcttcttcaagaacgtactggctggaacgagcaggacattgtttcacgcgtgcaggcgtatatcaccacgcaaggttcgaaaggagccctggtacatacaccggagaagacctacgatattccgccggcacacgaacgtcgtgtcgttgatccaactggttgcggcgacgcgtttcgcgccggcctgatctatggtattcagcataattatgattggttgaccattggccgcatgggaaacttaatgggtgcgctgaaagtggaacaccctggcacgcaaaatcagcgtttcgattttgccgaattcaacgaccagttcaaacaacagtttggctacgcgctc

SEQ ID NO: 302 - protein, 321 aa, synthetic construct
  REGION 1..321: note = Variant of adenosine kinase
MHHHHHHGGSGMSALICGSLAYDTIMVFPDQFKNHILPDKVHILNVSFLVPRMRREFGGCAGNIAYNLHLLGGAPIPMGTVGQDFGPYREHFETLGIDLSRVKIIDDLSTPQAFITTDHDHNQITAFHPAAMMRSYENHVRDVPGVTLGLVGPDGREGMIQNAEEFAAGGIPFIFDPGQALPLFNGPELREFIEQADYVVVNDYESNLLQERTGWNEQDIVSRVQAYITTQGSKGALVHTPEKTYDIPPAHERRVVDPTGCGDAFRAGLIYGIQHNYDWLTIGRMGNLMGALKVEHPGTQNQRFDFAEFNDQFKQQFGYAL

SEQ ID NO: 303 - DNA, 963 bp, synthetic construct
  misc_feature 1..963: note = Variant of adenosine kinase
  source 1..963: mol_type = other DNA
atgcaccatcatcaccatcacgggggctccggcatgagtgcactgatttgcggttctttagcgtatgataccatcatggtgtttccggaccagttcaagaaacatattctgtgcgataaagttcacatcctcaatgtcagctttcttgtaccacgcatgcgtcgtgaatttggaggctgtgccggcaacattgcgtacaatctgcatctgttgggtggtgctccgatccctatgggaacggtgggccaagatttcggtccgtatcgcgagcacttcgaaactctgggcattgacttatcccgcgtcaagatcatcgatgatctgtttacaccgcaggccttcattaccaccgaccatgatcataaccagattacggcgtttcatccaggcgcaatgatgcgttcgtacgaaaatcacgttcgtgatgtgccgggtgttaccttgggcctcgtaggtcctgatggacgcgagggcatgatccaaaatgccgaagaatttgctgctggtggcattccgttcatttttgacccaggtcaggcaatgccgctgttcaacggccccgaactgcgcgagtttatcgaacaggcggactatgtggtggtcaacgattacgaaagcaatcttcttcaagaacgtactggctggaacgagcaggacattgtttcacgcgtgcaggcgtatatcaccacgcaaggtcctaaaggagccctggtacatacaccggagaagacctacgatattcctccggcacacgaacctcgtgtcgttgatccaactggttgcggcgacgcgtttcgcgccggcctgatctatggtattcagcataattatgattggttgaccattggccgcatgggaaacttaatgggtgcgctgaaagtggaacaccctggcacgcaaaatcagcgtttcgattttgccgagttcaacgaccagttcaaacaacagtttggctacgcgctc

SEQ ID NO: 304 - protein, 321 aa, synthetic construct
  REGION 1..321: note = Variant of adenosine kinase
MHHHHHHGGSGMSALICGSLAYDTIMVFPDQFKKHILCDKVHILNVSFLVPRMRREFGGCAGNIAYNLHLLGGAPIPMGTVGQDFGPYREHFETLGIDLSRVKIIDDLFTPQAFITTDHDHNQITAFHPGAMMRSYENHVRDVPGVTLGLVGPDGREGMIQNAEEFAAGGIPFIFDPGQAMPLFNGPELREFIEQADYVVVNDYESNLLQERTGWNEQDIVSRVQAYITTQGPKGALVHTPEKTYDIPPAHEPRVVDPTGCGDAFRAGLIYGIQHNYDWLTIGRMGNLMGALKVEHPGTQNQRFDFAEFNDQFKQQFGYAL

SEQ ID NO: 305 - DNA, 963 bp, synthetic construct
  misc_feature 1..963: note = Variant of adenosine kinase
  source 1..963: mol_type = other DNA
atgcaccatcatcaccatcacgggggctccggcatgagtgcactgatttgcggttctttagcgtatgataccatcatggtgtttccggaccagttcaagaaccatattctgcccgataaagttcacatcctcaatgtcagctttcttgtaccacgcatgcgtcgtgaatttggaggctgtgccggcaacattgcgtacaatctgcatctgttgggtggtgctccgatccctatgggaacggtgggccaagatttcggtccgtatcgcgagcacttcgaaactctgggcattgacttatcccgcgtcaagatcatcgatgatctgtttacaccgcaggccttcattaccaccgaccatgatcataaccagattacggcgtttcatccaggcgcaatgatgcgttcgtacgaaaatcacgttcgtgatgtgccgggtgttaccttgggcctcgtaggtcctgatggacgcgagggcatgatccaaaatgccgaagaatttgctgctggtggcattccgttcatttttgacccaggtcaggcaatgccgctgttcaacggccccgaactgcgcgagtttatcgaacaggcggactatgtggtggtcaacgattacgaaagcaatcttcttcaagaacgtactggctggaacgagcaggacattgtttcacgcgtgcaggcgtatatcaccacgcaaggtcctaaaggagccctggtacatacaccggagaagacctacgatattcctccggcacacgaacctcgtgtcgttgatccaactggttgcggcgacgcgtttcgcgccggcctgatctatggtattcagcataattatgattggttgaccattggccgcatgggaaacttaatgggtgcgctgaaagtggaacaccctggcacgcaaaatcagcgtttcgattttgccgagttcaacgaccagttcaaacaacagtttggctacgcgctc

SEQ ID NO: 306 - protein, 321 aa, synthetic construct
  REGION 1..321: note = Variant of adenosine kinase
MHHHHHHGGSGMSALICGSLAYDTIMVFPDQFKNHILPDKVHILNVSFLVPRMRREFGGCAGNIAYNLHLLGGAPIPMGTVGQDFGPYREHFETLGIDLSRVKIIDDLFTPQAFITTDHDHNQITAFHPGAMMRSYENHVRDVPGVTLGLVGPDGREGMIQNAEEFAAGGIPFIFDPGQAMPLFNGPELREFIEQADYVVVNDYESNLLQERTGWNEQDIVSRVQAYITTQGPKGALVHTPEKTYDIPPAHEPRVVDPTGCGDAFRAGLIYGIQHNYDWLTIGRMGNLMGALKVEHPGTQNQRFDFAEFNDQFKQQFGYAL

SEQ ID NO: 307 - DNA, 963 bp, synthetic construct
  misc_feature 1..963: note = Variant of adenosine kinase
  source 1..963: mol_type = other DNA
atgcaccatcatcaccatcacgggggctccggcatgagtgcactgatttgcggttctttagcgtatgataccatcatggtgtttccggaccagttcaagcgtcatattctgtgcgataaagttcacatcctcaatgtcagctttcttgtaccacgcatgcgtcgtgaatttggaggctgtgccggcaacattgcgtacaatctgcatctgttgggtggtgctccgatccctatgggaacggtgggccaagatttcggtccgtatcgcgagcacttcgaaactctgggcattgacttatcccgcgtccgtatcatcgatgatctgtttacaccgcaggccttcattaccaccgaccatgatcataaccagattacggcgtttcatccaggcgcaatgatgcgttcgtacgaaaatcacgttcgtgatgtgccgggtgttaccttgggcctcgtaggtcctgatggacgcgagggcatgatccaaaatgccgaagaatttgctgctggtggcattccgttcatttttgacccaggtcaggcaatgccgctgttcaacggccccgaactgcgcgagtttatcgaacaggcggactatgtggtggtcaacgattacgaaagcaatgtgcttcaggaacgtactggctggaacgagcaggacattgtttcacgcgtgcaggcgtatatcaccacgcaaggtcctaaaggagccctggtacatacaccggagaagacctacgatattcctagtgcacacgaacgtcgtgtcgttgatccaactggttgcggcgacgcgtttcgcgccggcctgatctatggtattcagcataattatgattggttgaccattggccgcatgggaaacttaatgggtgcgctgaaagtggaacaccctggcacgcaaaatcagcgtttcgattttgccgagttcaacgaccagttcaaacaacagtttggctacgcgctc

SEQ ID NO: 308 - protein, 321 aa, synthetic construct
  REGION 1..321: note = Variant of adenosine kinase
MHHHHHHGGSGMSALICGSLAYDTIMVFPDQFKRHILCDKVHILNVSFLVPRMRREFGGCAGNIAYNLHLLGGAPIPMGTVGQDFGPYREHFETLGIDLSRVRIIDDLFTPQAFITTDHDHNQITAFHPGAMMRSYENHVRDVPGVTLGLVGPDGREGMIQNAEEFAAGGIPFIFDPGQAMPLFNGPELREFIEQADYVVVNDYESNVLQERTGWNEQDIVSRVQAYITTQGPKGALVHTPEKTYDIPSAHERRVVDPTGCGDAFRAGLIYGIQHNYDWLTIGRMGNLMGALKVEHPGTQNQRFDFAEFNDQFKQQFGYAL

SEQ ID NO: 309 - DNA, 963 bp, synthetic construct
  misc_feature 1..963: note = Variant of adenosine kinase
  source 1..963: mol_type = other DNA
atgcaccatcatcaccatcacgggggctccggcatgagtgcactgatttgcggttctttagcgtatgataccatcatggtgtttccggaccagttcaagaaccatattctgcctgataaagttcacatcctcaatgtcagctttcttgtaccacgcatgcgtcgtgaatttggaggctgtgccggcaacattgcgtacaatctgcatctgttgggtggtgctccgatccctatgggaacggtgggccaagatttcggtccgtatcgcgagcacttcgaaactctgggcattgacttatcccgcgtccgtatcatcgatgatctgtttacaccgcaggccttcattaccaccgaccatgatcataaccagattacggcgtttcatccaggcgcaatgatgcgttcgtacgaaaatcacgttcgtgatgtgccgggtgttaccttgggcctcgtaggtcctgatggacgcgagggcatgatccaaaatgccgaagaatttgctgctggtggcattccgttcatttttgacccaggtcaggcaatgccgctgttcaacggccccgaactgcgcgagtttatcgaacaggcggactatgtggtggtcaacgattacgaaagcaatgtgcttgaggaacgtactggctggaacgagcaggacattgtttcacgcgtgcaggcgtatatcaccacgcaaggtcctaaaggagccctggtacatacaccggagaagacctacgatattccgccggcacacgaacctcgtgtcgttgatccaactggttgcggcgacgcgtttcgcgccggcctgatctatggtattcagcataattatgattggttgaccattggccgcatgggaaacttaatgggtgcgctgaaagtggaacaccctggcacgcaaaatcagcgtttcgattttgccgagttcaacgaccagttcaaacaacagtttggctacgcgctc

SEQ ID NO: 310 - protein, 321 aa, synthetic construct
  REGION 1..321: note = Variant of adenosine kinase
MHHHHHHGGSGMSALICGSLAYDTIMVFPDQFKNHILPDKVHILNVSFLVPRMRREFGGCAGNIAYNLHLLGGAPIPMGTVGQDFGPYREHFETLGIDLSRVRIIDDLFTPQAFITTDHDHNQITAFHPGAMMRSYENHVRDVPGVTLGLVGPDGREGMIQNAEEFAAGGIPFIFDPGQAMPLFNGPELREFIEQADYVVVNDYESNVLEERTGWNEQDIVSRVQAYITTQGPKGALVHTPEKTYDIPPAHEPRVVDPTGCGDAFRAGLIYGIQHNYDWLTIGRMGNLMGALKVEHPGTQNQRFDFAEFNDQFKQQFGYAL

SEQ ID NO: 311 - DNA, 963 bp, synthetic construct
  misc_feature 1..963: note = Variant of adenosine kinase
  source 1..963: mol_type = other DNA
atgcaccatcatcaccatcacgggggctccggcatgagtgcactgatttgcggttctttagcgtatgataccatcatggtgtttccggaccagttcaagaaccatattctgcccgataaggttcacatcctcaatgtcagctttcttgtaccacgcatgcgtcgtgaatttggaggctgtgccggcaacattgcgtacaatctgcatctgttgggtggtgctccgatccctatgggaacggtgggccaagatttcggtccgtatcgcgagcacttcgaaactctgggcattgacttatcccgcgtcaagatcatcgatgatctgtttacaccgcaggccttcattaccaccgaccatgatcataaccagattacggcgtttcatccagcggcaatgatgcgttcgtacgaaaatcacgttcgtgatgtgccgggtgttaccttgggcctcgtaggtcctgatggacgcgagggcatgatccaaaatgccgaagaatttgctgctggtggcattccgttcatttttgacccaggtcaggcactgccgctgttcaacggccccgaactgcgcgagtttatcgaacaggcggactatgtggtggtcaacgattacgaaagcaatcttcttcaagaacgtactggctggaacgagcaggacattgtttcacgcgtgcaggcgtatatcaccacgcaaggttcgaaaggagccctggtacatacaccggagaagacctacgatattccgccggcacacgaacgtcgtgtcgttgatccaactggttgcggcgacgcgtttcgcgccggcctgatctatggtattcagcataattatgattggttgaccattggccgcatgggaaacttaatgggtgcgctgaaagtggaacaccctggcacgcaaaatcagcgtttcgattttgccgaattcaacgaccagttcaaacaagattttggctacgcgctc

SEQ ID NO: 312 - protein, 321 aa, synthetic construct
  REGION 1..321: note = Variant of adenosine kinase
MHHHHHHGGSGMSALICGSLAYDTIMVFPDQFKNHILPDKVHILNVSFLVPRMRREFGGCAGNIAYNLHLLGGAPIPMGTVGQDFGPYREHFETLGIDLSRVKIIDDLFTPQAFITTDHDHNQITAFHPAAMMRSYENHVRDVPGVTLGLVGPDGREGMIQNAEEFAAGGIPFIFDPGQALPLFNGPELREFIEQADYVVVNDYESNLLQERTGWNEQDIVSRVQAYITTQGSKGALVHTPEKTYDIPPAHERRVVDPTGCGDAFRAGLIYGIQHNYDWLTIGRMGNLMGALKVEHPGTQNQRFDFAEFNDQFKQDFGYAL

SEQ ID NO: 313 - DNA, 963 bp, synthetic construct
  misc_feature 1..963: note = Variant of adenosine kinase
  source 1..963: mol_type = other DNA
atgcaccatcatcaccatcacgggggctccggcatgagtgcactgatttgcggttctttagcgtatgataccatcatggtgtttccggaccagttcaagaaccatattctgcccgataaggttcacatcctcaatgtcagctttcttgtaccacgcatgcgtcgtgaatttggaggctgtgccggcaacattgcgtacaatctgcatctgttgggtggtgctccgatccctatgggaacggtgggccaagatttcggtccgtatcgcgagcacttcgaaactctgggcattgacttatcccgcgtcaagatcatcgatgatctgagtacagcgcaggccttcattaccaccgaccatgatcataaccagattacggcgtttcatccagcggcaatgatgcgttcgtacgaaaatcacgttcgtgatgtgccgggtgttaccttgggcctcgtaggtcctgatggacgcgagggcatgatccaaaatgccgaagaatttgctgctggtggcattccgttcatttttgacccaggtcaggcactgccgctgttcaacggccccgaactgcgcgagtttatcgaacaggcggactatgtggtggtcaacgattacgaaagcaatcttcttcaagaacgtactggctggaacgagcaggacattgtttcacgcgtgcaggcgtatatcaccacgcaaggttcgaaaggagccctggtacatacaccggagaagacctacgatattccgccggcacacgaacgtcgtgtcgttgatccaactggttgcggcgacgcgtttcgcgccggcctgatctatggtattcagcataattatgattggttgaccattggccgcatgggaaacttaatgggtgcgctgaaagtggaacaccctggcacgcaaaatcagcgtttcgattttgccgaattcaacgaccagttcaaacaacagtttggctacgcgctc

SEQ ID NO: 314 - protein, 321 aa, synthetic construct
  REGION 1..321: note = Variant of adenosine kinase
MHHHHHHGGSGMSALICGSLAYDTIMVFPDQFKNHILPDKVHILNVSFLVPRMRREFGGCAGNIAYNLHLLGGAPIPMGTVGQDFGPYREHFETLGIDLSRVKIIDDLSTAQAFITTDHDHNQITAFHPAAMMRSYENHVRDVPGVTLGLVGPDGREGMIQNAEEFAAGGIPFIFDPGQALPLFNGPELREFIEQADYVVVNDYESNLLQERTGWNEQDIVSRVQAYITTQGSKGALVHTPEKTYDIPPAHERRVVDPTGCGDAFRAGLIYGIQHNYDWLTIGRMGNLMGALKVEHPGTQNQRFDFAEFNDQFKQQFGYAL

SEQ ID NO: 315 - DNA, 963 bp, synthetic construct
  misc_feature 1..963: note = Variant of adenosine kinase
  source 1..963: mol_type = other DNA
atgcaccatcatcaccatcacgggggctccggcatgagtgcactgatttgcggttctttagcgtatgataccatcatggtgtttccggaccagttcaagcgtcatattctgtgcgataaagttcacatcctcaatgtcagctttcttgtaccacgcatgcgtcgtgaatttggaggctgtgccggcaacattgcgtacaatctgcatctgttgggtggtgctccgatccctatgggaacggtgggccaagatttcggtccgtatcgcgagcacttcgaaactctgggcattgacttatcccgcgtcaagatcatcgatgatctgtttacaccgcaggccttcattaccaccgaccatgatcataaccagattacggcgtttcatccaggcgcaatgatgcgttcgtacgaaaatcacgttcgtgatgtgccgggtgttaccttgggcctcgtaggtcctgatggacgcgagggcatgatccaaaatgccgaagaatttgctgctggtggcattccgttcatttttgacccaggtcaggcaatgccgctgttcaacggccccgaactgcgcgagtttatcgaacaggcggactatgtggtggtcaacgattacgaaagcaatctgcttgagacccgtactggctggaacgagcaggacattgtttcacgcgtgcaggcgtatatcaccacgcaaggtcctaaaggagccctggtacatacaccggagaagacctacgatattccgccggcacacgaacctcgtgtcgttgatccaactggttgcggcgacgcgtttcgcgccggcctgatctatggtattcagcataattatgattggttgaccattggccgcatgggaaacttaatgggtgcgctgaaagtggaacaccctggcacgcaaaatcagcatttcgattttgccgagttcaacgaccagttcaaacaacagtttggctacgcgctc

SEQ ID NO: 316 - protein, 321 aa, synthetic construct
  REGION 1..321: note = Variant of adenosine kinase
MHHHHHHGGSGMSALICGSLAYDTIMVFPDQFKRHILCDKVHILNVSFLVPRMRREFGGCAGNIAYNLHLLGGAPIPMGTVGQDFGPYREHFETLGIDLSRVKIIDDLFTPQAFITTDHDHNQITAFHPGAMMRSYENHVRDVPGVTLGLVGPDGREGMIQNAEEFAAGGIPFIFDPGQAMPLFNGPELREFIEQADYVVVNDYESNLLETRTGWNEQDIVSRVQAYITTQGPKGALVHTPEKTYDIPPAHEPRVVDPTGCGDAFRAGLIYGIQHNYDWLTIGRMGNLMGALKVEHPGTQNQHFDFAEFNDQFKQQFGYAL

SEQ ID NO: 317 - DNA, 963 bp, synthetic construct
  misc_feature 1..963: note = Variant of adenosine kinase
  source 1..963: mol_type = other DNA
atgcaccatcatcaccatcacgggggctccggcatgagtgcactgatttgcggttctttagcgtatgataccatcatggtgtttccggaccagttcaagaaccatattctgcctgataaagttcacatcctcaatgtcagctttcttgtaccacgcatgcgtcgtgaatttggaggctgtgccggcaacattgcgtacaatctgcatctgttgggtggtgctccgatccctatgggaacggtgggccaagatttcggtccgtatcgcgagcacttcgaaactctgggcattgacttatcccgcgtccgtatcatcgatgatctgtttacaccgcaggccttcattatgaccgaccatgatcataaccagattacggcgtttcatccaggcgcaatgatgcgttcgtacgaaaatcacgttcgtgatgtgccgggtgttaccttgggcctcgtaggtcctgatggacgcgagggcatgatccaaaatgccgaagaatttgctgctggtggcattccgttcatttttgacccaggtcaggcaatgccgctgttcaacggccccgaactgcgcgagtttatcgaacaggcggactatgtggtggtcaacgattacgaaagcaatgtgcttcaggaacgtactggctggaacgagcaggacattgtttcacgcgtgcaggcgtatatcaccacgcaaggtcctaaaggagccctggtacatacaccggagaagacctacgatattcctccggcacacgaacgtcgtgtcgttgatccaactggttgcggcgacgcgtttcgcgccggcctgatctatggtattcagcataattatgattggttgaccattggccgcatgggaaacttaatgggtgcgctgaaagtggaacaccctggcacgcaaaatcagcgtttcgattttgccgagttcaacgaccagttcaaacaacagtttggctacgcgctc

SEQ ID NO: 318 - protein, 321 aa, synthetic construct
  REGION 1..321: note = Variant of adenosine kinase
MHHHHHHGGSGMSALICGSLAYDTIMVFPDQFKNHILPDKVHILNVSFLVPRMRREFGGCAGNIAYNLHLLGGAPIPMGTVGQDFGPYREHFETLGIDLSRVRIIDDLFTPQAFIMTDHDHNQITAFHPGAMMRSYENHVRDVPGVTLGLVGPDGREGMIQNAEEFAAGGIPFIFDPGQAMPLFNGPELREFIEQADYVVVNDYESNVLQERTGWNEQDIVSRVQAYITTQGPKGALVHTPEKTYDIPPAHERRVVDPTGCGDAFRAGLIYGIQHNYDWLTIGRMGNLMGALKVEHPGTQNQRFDFAEFNDQFKQQFGYAL

SEQ ID NO: 319 - DNA, 963 bp, synthetic construct
  misc_feature 1..963: note = Variant of adenosine kinase
  source 1..963: mol_type = other DNA
atgcaccatcatcaccatcacgggggctccggcatgagtgcactgatttgcggttctttagcgtatgataccatcatggtgtttccggaccagttcaagcgtcatattctgcctgataaagttcacatcctcaatgtcagctttcttgtaccacgcatgcgtcgtgaatttggaggctgtgccggcaacattgcgtacaatctgcatctgttgggtggtgctccgatccctatgggaacggtgggccaagatttcggtccgtatcgcgagcacttcgaaactctgggcattgacttatcccgcgtcaagatcatcgatgatctgtttacaccgcaggccttcattatgaccgaccatgatcataaccagattacggcgtttcatccaggcgcaatgatgcgttcgtacgaaaatcacgttcgtgatgtgccgggtgttaccttgggcctcgtaggtcctgatggacgcgagggcatgatccaaaatgccgaagaatttgctgctggtggcattccgttcatttttgacccaggtcaggcaatgccgctgttcaacggccccgaactgcgcgagtttatcgaacaggcggactatgtggtggtcaacgattacgaaagcaatcttcttcaagaacgtactggctggaacgagcaggacattgtttcacgcgtgcaggcgtatatcaccacgcaaggtcctaaaggagccctggtacatacaccggagaagacctacgatattcgtccggcacacaaacctcgtgtcgttgatccaactggttgcggcgacgcgtttcgcgccggcctgatctatggtattcagcataattatgattggttgaccattggccgcatgggaaacttaatgggtgcgctgaaagtggaacaccctggcacgcaaaatcagcgtttcgattttgccgaattcaacgaccagttcaaacaacagtttggctacgcgctc

SEQ ID NO: 320 - protein, 321 aa, synthetic construct
  REGION 1..321: note = Variant of adenosine kinase
MHHHHHHGGSGMSALICGSLAYDTIMVFPDQFKRHILPDKVHILNVSFLVPRMRREFGGCAGNIAYNLHLLGGAPIPMGTVGQDFGPYREHFETLGIDLSRVKIIDDLFTPQAFIMTDHDHNQITAFHPGAMMRSYENHVRDVPGVTLGLVGPDGREGMIQNAEEFAAGGIPFIFDPGQAMPLFNGPELREFIEQADYVVVNDYESNLLQERTGWNEQDIVSRVQAYITTQGPKGALVHTPEKTYDIRPAHKPRVVDPTGCGDAFRAGLIYGIQHNYDWLTIGRMGNLMGALKVEHPGTQNQRFDFAEFNDQFKQQFGYAL

SEQ ID NO: 321 - DNA, 963 bp, synthetic construct
  misc_feature 1..963: note = Variant of adenosine kinase
  source 1..963: mol_type = other DNA
atgcaccatcatcaccatcacgggggctccggcatgagtgcactgatttgcggttctttagcgtatgataccatcatggtgtttccggaccagttcaagcgtcatattctgtgcgataaagttcacatcctcaatgtcagctttcttgtaccacgcatgcgtcgtgaatttggaggctgtgccggcaacattgcgtacaatctgcatctgttgggtggtgctccgatccctatgggaacggtgggccaagatttcggtccgtatcgcgagcacttcgaaactctgggcattgacttatcccgcgtccgtatcatcgatgatctgtttacaccgcaggccttcattaccaccgaccatgatcataaccagattacggcgtttcatccaggcgcaatgatgcgttcgtacgaaaatcacgttcgtgatgtgccgggtgttaccttgggcctcgtaggtcctgatggacgcgagggcatgatccaaaatgccgaagaatttgctgctggtggcattccgttcatttttgacccaggtcaggcaatgccgctgttcaacggccccgaactgcgcgagtttatcgaacaggcggactatgtggtggtcaacgattacgaaagcaatctgcttgagacccgtactggctggaacgagcaggacattgtttcacgcgtgcaggcgtatatcaccacgcaaggtcctaaaggagccctggtacatacaccggagaagacctacgatattcctggtgcacacgaacgtcgtgtcgttgatccaactggttgcggcgacgcgtttcgcgccggcctgatctatggtattcagcataattatgattggttgaccattggccgcatgggaaacttaatgggtgcgctgaaagtggaacaccctggcacgcaaaatcagcgtttcgattttgccgagttcaacgaccagttcaaacaacagtttggctacgcgctc

SEQ ID NO: 322 - protein, 321 aa, synthetic construct
  REGION 1..321: note = Variant of adenosine kinase
MHHHHHHGGSGMSALICGSLAYDTIMVFPDQFKRHILCDKVHILNVSFLVPRMRREFGGCAGNIAYNLHLLGGAPIPMGTVGQDFGPYREHFETLGIDLSRVRIIDDLFTPQAFITTDHDHNQITAFHPGAMMRSYENHVRDVPGVTLGLVGPDGREGMIQNAEEFAAGGIPFIFDPGQAMPLFNGPELREFIEQADYVVVNDYESNLLETRTGWNEQDIVSRVQAYITTQGPKGALVHTPEKTYDIPGAHERRVVDPTGCGDAFRAGLIYGIQHNYDWLTIGRMGNLMGALKVEHPGTQNQRFDFAEFNDQFKQQFGYAL

SEQ ID NO: 323 - DNA, 963 bp, synthetic construct
  misc_feature 1..963: note = Variant of adenosine kinase
  source 1..963: mol_type = other DNA
atgcaccatcatcaccatcacgggggctccggcatgagtgcactgatttgcggttctttagcgtatgataccatcatggtgtttccggaccagttcaagaaccatattctgcccgatcgtgttcacatcctcaatgtcagctttcttgtaccacgcatgcgtcgtgaatttggaggctgtgccggcaacattgcgtacaatctgcatctgttgggtggtgctccgatccctatgggaacggtgggccaagatttcggtccgtatcgcgagcacttcgaaactctgggcattgacttatcccgcgtcaagatcatcgatgatctgtttacaccgcaggccttcattaccaccgaccatgatcataaccagattacggcgtttcatccaggggcaatgatgcgttcgtacgaaaatcacgttcgtgatgtgccgggtgttaccttgggcctcgtaggtcctgatggacgcgagggcatgatccaaaatgccgaagaatttgctgctggtggcattccgttcatttttgacccaggtcaggcaatgccgctgttcaacggccccgaactgcgcgagtttatcgaacaggcggactatgtggtggtcaacgattacgaaagcaatcttcttcaagaacgtactggctggaacgagcaggacattgtttcacgcgtgcaggcgtatatcaccacgcaaggttcgaaaggagccctggtacatacaccggagaagacctacgatattccgccggcacacgaacgtcgtgtcgttgatccaactggttgcggcgacgcgtttcgcgccggcctgatctatggtattcagcataattatgattggttgaccattggccgcatgggaaacttaatgggtgcgctgaaagtggaacaccctggcacgcaaaatcagcgtttcgattttgccgaattcaacgaccagttcaaacaaagctttggctacgcgctc

SEQ ID NO: 324 - protein, 321 aa, synthetic construct
  REGION 1..321: note = Variant of adenosine kinase
MHHHHHHGGSGMSALICGSLAYDTIMVFPDQFKNHILPDRVHILNVSFLVPRMRREFGGCAGNIAYNLHLLGGAPIPMGTVGQDFGPYREHFETLGIDLSRVKIIDDLFTPQAFITTDHDHNQITAFHPGAMMRSYENHVRDVPGVTLGLVGPDGREGMIQNAEEFAAGGIPFIFDPGQAMPLFNGPELREFIEQADYVVVNDYESNLLQERTGWNEQDIVSRVQAYITTQGSKGALVHTPEKTYDIPPAHERRVVDPTGCGDAFRAGLIYGIQHNYDWLTIGRMGNLMGALKVEHPGTQNQRFDFAEFNDQFKQSFGYAL

SEQ ID NO: 325 - DNA, 963 bp, synthetic construct
  misc_feature 1..963: note = Variant of adenosine kinase
  source 1..963: mol_type = other DNA
atgcaccatcatcaccatcacgggggctccggcatgagtgcactgatttgcggttctttagcgtatgataccatcatggtgtttccggaccagttcaagcgtcatattctgtgcgataaagttcacatcctcaatgtcagctttcttgtaccacgcatgcgtcgtgaatttggaggctgtgccggcaacattgcgtacaatctgcatctgttgggtggtgctccgatccctatgggaacggtgggccaagatttcggtccgtatcgcgagcacttcgaaactctgggcattgacttatcccgcgtcaagatcatcgatgatctgtttacaccgcaggccttcattaccaccgaccatgatcataaccagattacggcgtttcatccaggcgcaatgatgcgttcgtacgaaaatcacgttcgtgatgtgccgggtgttaccttgggcctcgtaggtcctgatggacgcgagggcatgatccaaaatgccgaagaatttgctgctggtggcattccgttcatttttgacccaggtcaggcaatgccgctgttcaacggccccgaactgcgcgagtttatcgaacaggcggactatgtggtggtcaacgattacgaaagcaatcttcttcaagaacgtactggctggaacgagcaggacattgtttcacgcgtgcaggcgtatatcaccacgcaaggtcctaaaggagccctggtacatacaccggagaagacctacgatattccgccggcacacgaacgtcgtgtcgttgatccaactggttgcggcgacgcgtttcgcgccggcctgatctatggtattcagcataattatgattggttgaccattggccgcatgggaaacttaatgggtgcgctgaaagtggaacaccctggcacgcaaaatcagcgtttcgattttgccgagttcaacgaccagttcaaacaacagtttggctacgcgctc

SEQ ID NO: 326 - protein, 321 aa, synthetic construct
  REGION 1..321: note = Variant of adenosine kinase
MHHHHHHGGSGMSALICGSLAYDTIMVFPDQFKRHILCDKVHILNVSFLVPRMRREFGGCAGNIAYNLHLLGGAPIPMGTVGQDFGPYREHFETLGIDLSRVKIIDDLFTPQAFITTDHDHNQITAFHPGAMMRSYENHVRDVPGVTLGLVGPDGREGMIQNAEEFAAGGIPFIFDPGQAMPLFNGPELREFIEQADYVVVNDYESNLLQERTGWNEQDIVSRVQAYITTQGPKGALVHTPEKTYDIPPAHERRVVDPTGCGDAFRAGLIYGIQHNYDWLTIGRMGNLMGALKVEHPGTQNQRFDFAEFNDQFKQQFGYAL

SEQ ID NO: 327 - DNA, 963 bp, synthetic construct
  misc_feature 1..963: note = Variant of adenosine kinase
  source 1..963: mol_type = other DNA
atgcaccatcatcaccatcacgggggctccggcatgagtgcactgatttgcggttctttagcgtatgataccatcatggtgtttccggaccagttcaagaaccatattctgcccgataaggttcacatcctcaatgtcagctttcttgtaccacgcatgcgtcgtgaatttggaggctgtgccggcaacattgcgtacaatctgcatctgttgggtggtgctccgatccctatgggaacggtgggccaagatttcggtccgtatcgcgagcacttcgaaactctgggcattgacttatcccgcgtcaagatcatcgatgatctgagtacaccgcaggccttcattaccaccgaccatgatcataaccagattacggcgtttcatccagcggcaatgatgcgttcgtacgaaaatcacgttcgtgatgtgccgggtgttaccttgggcctcgtaggtcctgatggacgcgagggcatgatccaaaatgccgaagaatttgctgctggtggcattccgttcatttttgacccaggtcaggcaatgccgctgttcaacggccccgaactgcgcgagtttatcgaacaggcggactatgtggtggtcaacgattacgaaagcaatcttcttcaagaacgtactggctggaacgagcaggacattgtttcacgcgtgcaggcgtatatcaccacgcaaggttcgaaaggagccctggtacatacaccggagaagacctacgatattccgccggcacacgaacgtcgtgtcgttgatccaactggttgcggcgacgcgtttcgcgccggcctgatctatggtattcagcataattatgattggttgaccattggccgcatgggaaacttaatgggtgcgctgaaagtggaacaccctggcacgcaaaatcagcgtttcgattttgccgaattcaacgaccagttcaaacaacagtttggctacgcgctc

SEQ ID NO: 328 - protein, 321 aa, synthetic construct
  REGION 1..321: note = Variant of adenosine kinase
MHHHHHHGGSGMSALICGSLAYDTIMVFPDQFKNHILPDKVHILNVSFLVPRMRREFGGCAGNIAYNLHLLGGAPIPMGTVGQDFGPYREHFETLGIDLSRVKIIDDLSTPQAFITTDHDHNQITAFHPAAMMRSYENHVRDVPGVTLGLVGPDGREGMIQNAEEFAAGGIPFIFDPGQAMPLFNGPELREFIEQADYVVVNDYESNLLQERTGWNEQDIVSRVQAYITTQGSKGALVHTPEKTYDIPPAHERRVVDPTGCGDAFRAGLIYGIQHNYDWLTIGRMGNLMGALKVEHPGTQNQRFDFAEFNDQFKQQFGYAL

SEQ ID NO: 329 - DNA, 963 bp, synthetic construct
  misc_feature 1..963: note = Variant of adenosine kinase
  source 1..963: mol_type = other DNA
atgcaccatcatcaccatcacgggggctccggcatgagtgcactgatttgcggttctttagcgtatgataccatcatggtgtttccggaccagttcaagaaccatattctgcccgataaggttcacatcctcaatgtcagctttcttgtaccacgcatgcgtcgtgaatttggaggctgtgccggcaacattgcgtacaatctgcatctgttgggtggtgctccgatccctatgggaacggtgggccaagatttcggtccgtatcgcgagcacttcgaaactctgggcattgacttatcccgcgtcaagatcatcgatgatctgttcacagcgcaggccttcattaccaccgaccatgatcataaccagattacggcgtttcatccagcggcaatgatgcgttcgtacgaaaatcacgttcgtgatgtgccgggtgttaccttgggcctcgtaggtcctgatggacgcgagggcatgatccaaaatgccgaagaatttgctgctggtggcattccgttcatttttgacccaggtcaggcactgccgctgttcaacggccccgaactgcgcgagtttatcgaacaggcggactatgtggtggtcaacgattacgaaagcaatcttcttcaagaacgtactggctggaacgagcaggacattgtttcacgcgtgcaggcgtatatcaccacgcaaggttcgaaaggagccctggtacatacaccggagaagacctacgatattccgccggcacacgaacgtcgtgtcgttgatccaactggttgcggcgacgcgtttcgcgccggcctgatctatggtattcagcataattatgattggttgaccattggccgcatgggaaacttaatgggtgcgctgaaagtggaacaccctggcacgcaaaatcagcgtttcgattttgccgaattcaacgaccagttcaaacaaagctttggctacgcgctc

SEQ ID NO: 330 - protein, 321 aa, synthetic construct
  REGION 1..321: note = Variant of adenosine kinase
MHHHHHHGGSGMSALICGSLAYDTIMVFPDQFKNHILPDKVHILNVSFLVPRMRREFGGCAGNIAYNLHLLGGAPIPMGTVGQDFGPYREHFETLGIDLSRVKIIDDLFTAQAFITTDHDHNQITAFHPAAMMRSYENHVRDVPGVTLGLVGPDGREGMIQNAEEFAAGGIPFIFDPGQALPLFNGPELREFIEQADYVVVNDYESNLLQERTGWNEQDIVSRVQAYITTQGSKGALVHTPEKTYDIPPAHERRVVDPTGCGDAFRAGLIYGIQHNYDWLTIGRMGNLMGALKVEHPGTQNQRFDFAEFNDQFKQSFGYAL

SEQ ID NO: 331 - DNA, 963 bp, synthetic construct
  misc_feature 1..963: note = Variant of adenosine kinase
  source 1..963: mol_type = other DNA
atgcaccatcatcaccatcacgggggctccggcatgagtgcactgatttgcggttctttagcgtatgataccatcatggtgtttccggaccagttcaagaaacatattctgtgcgataaagttcacatcctcaatgtcagctttcttgtaccacgcatgcgtcgtgaatttggaggctgtgccggcaacattgcgtacaatctgcatctgttgggtggtgctccgatccctatgggaacggtgggccaagatttcggtccgtatcgcgagcacttcgaaactctgggcattgacttatcccgcgtcaagatcatcgatgatctgtttacaccgcaggccttcattaccaccgaccatgatcataaccagattacggcgtttcatccaggcgcaatgatgcgttcgtacgaaaatcacgttcgtgatgtgccgggtgttaccttgggcctcgtaggtcctgatggacgcgagggcatgatccaaaatgccgaagaatttgctgctggtggcattccgttcatttttgacccaggtcaggcaatgccgctgttcaacggccccgaactgcgcgagtttatcgaacaggcggactatgtggtggtcaacgattacgaaagcaatcttcttcaggaacgtactggctggaacgagcaggacattgtttcacgcgtgcaggcgtatatcaccacgcaaggtcctaaaggagccctggtacatacaccggagaagacctacgatattcctggtgcacacgaacctcgtgtcgttgatccaactggttgcggcgacgcgtttcgcgccggcctgatctatggtattcagcataattatgattggttgaccattggccgcatgggaaacttaatgggtgcgctgaaagtggaacaccctggcacgcaaaatcagcgtttcgattttgccgagttcaacgaccagttcaaacaacagtttggctacgcgctc

SEQ ID NO: 332 - protein, 321 aa, synthetic construct
  REGION 1..321: note = Variant of adenosine kinase
MHHHHHHGGSGMSALICGSLAYDTIMVFPDQFKKHILCDKVHILNVSFLVPRMRREFGGCAGNIAYNLHLLGGAPIPMGTVGQDFGPYREHFETLGIDLSRVKIIDDLFTPQAFITTDHDHNQITAFHPGAMMRSYENHVRDVPGVTLGLVGPDGREGMIQNAEEFAAGGIPFIFDPGQAMPLFNGPELREFIEQADYVVVNDYESNLLQERTGWNEQDIVSRVQAYITTQGPKGALVHTPEKTYDIPGAHEPRVVDPTGCGDAFRAGLIYGIQHNYDWLTIGRMGNLMGALKVEHPGTQNQRFDFAEFNDQFKQQFGYAL

SEQ ID NO: 333 - DNA, 963 bp, synthetic construct
  misc_feature 1..963: note = Variant of adenosine kinase
  source 1..963: mol_type = other DNA
atgcaccatcatcaccatcacgggggctccggcatgagtgcactgatttgcggttctttagcgtatgataccatcatggtgtttccggaccagttcaagaaacatattctgtgcgataaagttcacatcctcaatgtcagctttcttgtaccacgcatgcgtcgtgaatttggaggctgtgccggcaacattgcgtacaatctgcatctgttgggtggtgctccgatccctatgggaacggtgggccaagatttcggtccgtatcgcgagcacttcgaaactctgggcattgacttatcccgcgtcaagatcatcgatgatctgtttacaccgcaggccttcattaccaccgaccatgatcataaccagattacggcgtttcatccaggcgcaatgatgcgttcgtacgaaaatcacgttcgtgatgtgccgggtgttaccttgggcctcgtaggtcctgatggacgcgagggcatgatccaaaatgccgaagaatttgctgctggtggcattccgttcatttttgacccaggtcaggcaatgccgctgttcaacggccccgaactgcgcgagtttatcgaacaggcggactatgtggtggtcaacgattacgaaagcaatgtgcttcaggaacgtactggctggaacgagcaggacattgtttcacgcgtgcaggcgtatatcaccacgcaaggtcctaaaggagccctggtacatacaccggagaagacctacgatattcgtccggcacacgaacgtcgtgtcgttgatccaactggttgcggcgacgcgtttcgcgccggcctgatctatggtattcagcataattatgattggttgaccattggccgcatgggaaacttaatgggtgcgctgaaagtggaacaccctggcacgcaaaatcagcgtttcgattttgccgagttcaacgaccagttcaaacaacagtttggctacgcgctc

SEQ ID NO: 334 - protein, 321 aa, synthetic construct
  REGION 1..321: note = Variant of adenosine kinase
MHHHHHHGGSGMSALICGSLAYDTIMVFPDQFKKHILCDKVHILNVSFLVPRMRREFGGCAGNIAYNLHLLGGAPIPMGTVGQDFGPYREHFETLGIDLSRVKIIDDLFTPQAFITTDHDHNQITAFHPGAMMRSYENHVRDVPGVTLGLVGPDGREGMIQNAEEFAAGGIPFIFDPGQAMPLFNGPELREFIEQADYVVVNDYESNVLQERTGWNEQDIVSRVQAYITTQGPKGALVHTPEKTYDIRPAHERRVVDPTGCGDAFRAGLIYGIQHNYDWLTIGRMGNLMGALKVEHPGTQNQRFDFAEFNDQFKQQFGYAL

SEQ ID NO: 335 - DNA, 963 bp, synthetic construct
  misc_feature 1..963: note = Variant of adenosine kinase
  source 1..963: mol_type = other DNA
atgcaccatcatcaccatcacgggggctccggcatgagtgcactgatttgcggttctttagcgtatgataccatcatggtgtttccggaccagttcaagaaccatattctgcccgatcgtgttcacatcctcaatgtcagctttcttgtaccacgcatgcgtcgtgaatttggaggctgtgccggcaacattgcgtacaatctgcatctgttgggtggtgctccgatccctatgggaacggtgggccaagatttcggtccgtatcgcgagcacttcgaaactctgggcattgacttatcccgcgtcaagatcatcgatgatctgagtacagcgcaggccttcattaccaccgaccatgatcataaccagattacggcgtttcatccaggggcaatgatgcgttcgtacgaaaatcacgttcgtgatgtgccgggtgttaccttgggcctcgtaggtcctgatggacgcgagggcatgatccaaaatgccgaagaatttgctgctggtggcattccgttcatttttgacccaggtcaggcactgccgctgttcaacggccccgaactgcgcgagtttatcgaacaggcggactatgtggtggtcaacgattacgaaagcaatcttcttcaagaacgtactggctggaacgagcaggacattgtttcacgcgtgcaggcgtatatcaccacgcaaggttcgaaaggagccctggtacatacaccggagaagacctacgatattccgccggcacacgaacgtcgtgtcgttgatccaactggttgcggcgacgcgtttcgcgccggcctgatctatggtattcagcataattatgattggttgaccattggccgcatgggaaacttaatgggtgcgctgaaagtggaacaccctggcacgcaaaatcagcgtttcgattttgccgaattcaacgaccagttcaaacaaagctttggctacgcgctc

SEQ ID NO: 336 - protein, 321 aa, synthetic construct
  REGION 1..321: note = Variant of adenosine kinase
MHHHHHHGGSGMSALICGSLAYDTIMVFPDQFKNHILPDRVHILNVSFLVPRMRREFGGCAGNIAYNLHLLGGAPIPMGTVGQDFGPYREHFETLGIDLSRVKIIDDLSTAQAFITTDHDHNQITAFHPGAMMRSYENHVRDVPGVTLGLVGPDGREGMIQNAEEFAAGGIPFIFDPGQALPLFNGPELREFIEQADYVVVNDYESNLLQERTGWNEQDIVSRVQAYITTQGSKGALVHTPEKTYDIPPAHERRVVDPTGCGDAFRAGLIYGIQHNYDWLTIGRMGNLMGALKVEHPGTQNQRFDFAEFNDQFKQSFGYAL

SEQ ID NO: 337 - DNA, 963 bp, synthetic construct
  misc_feature 1..963: note = Variant of adenosine kinase
  source 1..963: mol_type = other DNA
atgcaccatcatcaccatcacgggggctccggcatgagtgcactgatttgcggttctttagcgtatgataccatcatggtgtttccggaccagttcaagaaccatattctgcccgataaagttcacatcctcaatgtcagctttcttgtaccacgcatgcgtcgtgaatttggaggctgtgccggcaacattgcgtacaatctgcatctgttgggtggtgctccgatccctatgggaacggtgggccaagatttcggtccgtatcgcgagcacttcgaaactctgggcattgacttatcccgcgtcaagatcatcgatgatctgtttacaccgcaggccttcattaccaccgaccatgatcataaccagattacggcgtttcatccagcggcaatgatgcgttcgtacgaaaatcacgttcgtgatgtgccgggtgttaccttgggcctcgtaggtcctgatggacgcgagggcatgatccaaaatgccgaagaatttgctgctggtggcattccgttcatttttgacccaggtcaggcaatgccgctgttcaacggccccgaactgcgcgagtttatcgaacaggcggactatgtggtggtcaacgattacgaaagcaatcttcttcaagaacgtactggctggaacgagcaggacattgtttcacgcgtgcaggcgtatatcaccacgcaaggtcctaaaggagccctggtacatacaccggagaagacctacgatattccgccggcacacgaacgtcgtgtcgttgatccaactggttgcggcgacgcgtttcgcgccggcctgatctatggtattcagcataattatgattggttgaccattggccgcatgggaaacttaatgggtgcgctgaaagtggaacaccctggcacgcaaaatcagcgtttcgattttgccgaattcaacgaccagttcaaacaaagctttggctacgcgctc

SEQ ID NO: 338 - protein, 321 aa, synthetic construct
  REGION 1..321: note = Variant of adenosine kinase
MHHHHHHGGSGMSALICGSLAYDTIMVFPDQFKNHILPDKVHILNVSFLVPRMRREFGGCAGNIAYNLHLLGGAPIPMGTVGQDFGPYREHFETLGIDLSRVKIIDDLFTPQAFITTDHDHNQITAFHPAAMMRSYENHVRDVPGVTLGLVGPDGREGMIQNAEEFAAGGIPFIFDPGQAMPLFNGPELREFIEQADYVVVNDYESNLLQERTGWNEQDIVSRVQAYITTQGPKGALVHTPEKTYDIPPAHERRVVDPTGCGDAFRAGLIYGIQHNYDWLTIGRMGNLMGALKVEHPGTQNQRFDFAEFNDQFKQSFGYAL

SEQ ID NO: 339 - DNA, 963 bp, synthetic construct
  misc_feature 1..963: note = Variant of adenosine kinase
  source 1..963: mol_type = other DNA
atgcaccatcatcaccatcacgggggctccggcatgagtgcactgatttgcggttctttagcgtatgataccatcatggtgtttccggaccagttcaagaaccatattctgcccgatcgtgttcacatcctcaatgtcagctttcttgtaccacgcatgcgtcgtgaatttggaggctgtgccggcaacattgcgtacaatctgcatctgttgggtggtgctccgatccctatgggaacggtgggccaagatttcggtccgtatcgcgagcacttcgaaactctgggcattgacttatcccgcgtcaagatcatcgatgatctgtttacaccgcaggccttcattaccaccgaccatgatcataaccagattacggcgtttcatccaggggcaatgatgcgttcgtacgaaaatcacgttcgtgatgtgccgggtgttaccttgggcctcgtaggtcctgatggacgcgagggcatgatccaaaatgccgaagaatttgctgctggtggcattccgttcatttttgacccaggtcaggcaatgccgctgttcaacggccccgaactgcgcgagtttatcgaacaggcggactatgtggtggtcaacgattacgaaagcaatcttcttcaagaacgtactggctggaacgagcaggacattgtttcacgcgtgcaggcgtatatcaccacgcaaggtccgaaaggagccctggtacatacaccggagaagacctacgatattccgccggcacacgaacgtcgtgtcgttgatccaactggttgcggcgacgcgtttcgcgccggcctgatctatggtattcagcataattatgattggttgaccattggccgcatgggaaacttaatgggtgcgctgaaagtggaacaccctggcacgcaaaatcagcgtttcgattttgccgaattcaacgaccagttcaaacaaagctttggctacgcgctc

SEQ ID NO: 340 - protein, 321 aa, synthetic construct
  REGION 1..321: note = Variant of adenosine kinase
MHHHHHHGGSGMSALICGSLAYDTIMVFPDQFKNHILPDRVHILNVSFLVPRMRREFGGCAGNIAYNLHLLGGAPIPMGTVGQDFGPYREHFETLGIDLSRVKIIDDLFTPQAFITTDHDHNQITAFHPGAMMRSYENHVRDVPGVTLGLVGPDGREGMIQNAEEFAAGGIPFIFDPGQAMPLFNGPELREFIEQADYVVVNDYESNLLQERTGWNEQDIVSRVQAYITTQGPKGALVHTPEKTYDIPPAHERRVVDPTGCGDAFRAGLIYGIQHNYDWLTIGRMGNLMGALKVEHPGTQNQRFDFAEFNDQFKQSFGYAL

SEQ ID NO: 341 - DNA, 963 bp, synthetic construct
  misc_feature 1..963: note = Variant of adenosine kinase
  source 1..963: mol_type = other DNA
atgcaccatcatcaccatcacgggggctccggcatgagtgcactgatttgcggttctttagcgtatgataccatcatggtgtttccggaccagttcaagaaccatattctgtgcgataaagttcacatcctcaatgtcagctttcttgtaccacgcatgcgtcgtgaatttggaggctgtgccggcaacattgcgtacaatctgcatctgttgggtggtgctccgatccctatgggaacggtgggccaagatttcggtccgtatcgcgagcacttcgaaactctgggcattgacttatcccgcgtcaagatcatcgatgatctgtttacaccgcaggccttcattatgaccgaccatgatcataaccagattacggcgtttcatccaggcgcaatgatgcgttcgtacgaaaatcacgttcgtgatgtgccgggtgttaccttgggcctcgtaggtcctgatggacgcgagggcatgatccaaaatgccgaagaatttgctgctggtggcattccgttcatttttgacccaggtcaggcaatgccgctgttcaacggccccgaactgcgcgagtttatcgaacaggcggactatgtggtggtcaacgattacgaaagcaatcttcttcaggaacgtactggctggaacgagcaggacattgtttcacgcgtgcaggcgtatatcaccacgcaaggtcctaaaggagccctggtacatacaccggagaagacctacgatattccgccggcacacgaacgtcgtgtcgttgatccaactggttgcggcgacgcgtttcgcgccggcctgatctatggtattcagcataattatgattggttgaccattggccgcatgggaaacttaatgggtgcgctgaaagtggaacaccctggcacgcaaaatcagcgtttcgattttgccgaattcaacgaccagttcaaacaacagtttggctacgcgctc

SEQ ID NO: 342 - protein, 321 aa, synthetic construct
  REGION 1..321: note = Variant of adenosine kinase
MHHHHHHGGSGMSALICGSLAYDTIMVFPDQFKNHILCDKVHILNVSFLVPRMRREFGGCAGNIAYNLHLLGGAPIPMGTVGQDFGPYREHFETLGIDLSRVKIIDDLFTPQAFIMTDHDHNQITAFHPGAMMRSYENHVRDVPGVTLGLVGPDGREGMIQNAEEFAAGGIPFIFDPGQAMPLFNGPELREFIEQADYVVVNDYESNLLQERTGWNEQDIVSRVQAYITTQGPKGALVHTPEKTYDIPPAHERRVVDPTGCGDAFRAGLIYGIQHNYDWLTIGRMGNLMGALKVEHPGTQNQRFDFAEFNDQFKQQFGYAL

SEQ ID NO: 343 - DNA, 963 bp, synthetic construct
  misc_feature 1..963: note = Variant of adenosine kinase
  source 1..963: mol_type = other DNA
atgcaccatcatcaccatcacgggggctccggcatgagtgcactgatttgcggttctttagcgtatgataccatcatggtgtttccggaccagttcaagaaacatattctgtgcgataaagttcacatcctcaatgtcagctttcttgtaccacgcatgcgtcgtgaatttggaggctgtgccggcaacattgcgtacaatctgcatctgttgggtggtgctccgatccctatgggaacggtgggccaagatttcggtccgtatcgcgagcacttcgaaactctgggcattgacttatcccgcgtcaagatcatcgatgatctgtttacaccgcaggccttcattatgaccgaccatgatcataaccagattacggcgtttcatccaggcgcaatgatgcgttcgtacgaaaatcacgttcgtgatgtgccgggtgttaccttgggcctcgtaggtcctgatggacgcgagggcatgatccaaaatgccgaagaatttgctgctggtggcattccgttcatttttgacccaggtcaggcaatgccgctgttcaacggccccgaactgcgcgagtttatcgaacaggcggactatgtggtggtcaacgattacgaaagcaatctgcttcaggaacgtactggctggaacgagcaggacattgtttcacgcgtgcaggcgtatatcaccacgcaaggtcctaaaggagccctggtacatacaccggagaagacctacgatattcctccggcacacgaacgtcgtgtcgttgatccaactggttgcggcgacgcgtttcgcgccggcctgatctatggtattcagcataattatgattggttgaccattggccgcatgggaaacttaatgggtgcgctgaaagtggaacaccctggcacgcaaaatcagcgtttcgattttgccgaattcaacgaccagttcaaacaacagtttggctacgcgctc

SEQ ID NO: 344 - protein, 321 aa, synthetic construct
  REGION 1..321: note = Variant of adenosine kinase
MHHHHHHGGSGMSALICGSLAYDTIMVFPDQFKKHILCDKVHILNVSFLVPRMRREFGGCAGNIAYNLHLLGGAPIPMGTVGQDFGPYREHFETLGIDLSRVKIIDDLFTPQAFIMTDHDHNQITAFHPGAMMRSYENHVRDVPGVTLGLVGPDGREGMIQNAEEFAAGGIPFIFDPGQAMPLFNGPELREFIEQADYVVVNDYESNLLQERTGWNEQDIVSRVQAYITTQGPKGALVHTPEKTYDIPPAHERRVVDPTGCGDAFRAGLIYGIQHNYDWLTIGRMGNLMGALKVEHPGTQNQRFDFAEFNDQFKQQFGYAL

SEQ ID NO: 345 - DNA, 963 bp, synthetic construct
  misc_feature 1..963: note = Variant of adenosine kinase
  source 1..963: mol_type = other DNA
atgcaccatcatcaccatcacgggggctccggcatgagtgcactgatttgcggttctttagcgtatgataccatcatggtgtttccggaccagttcaagaaccatattctgtgcgataaagttcacatcctcaatgtcagctttcttgtaccacgcatgcgtcgtgaatttggaggctgtgccggcaacattgcgtacaatctgcatctgttgggtggtgctccgatccctatgggaacggtgggccaagatttcggtccgtatcgcgagcacttcgaaactctgggcattgacttatcccgcgtcaagatcatcgatgatctgtttacaccgcaggccttcattatgaccgaccatgatcataaccagattacggcgtttcatccaggcgcaatgatgcgttcgtacgaaaatcacgttcgtgatgtgccgggtgttaccttgggcctcgtaggtcctgatggacgcgagggcatgatccaaaatgccgaagaatttgctgctggtggcattccgttcatttttgacccaggtcaggcaatgccgctgttcaacggccccgaactgcgcgagtttatcgaacaggcggactatgtggtggtcaacgattacgaaagcaatgtgcttgaggaacgtactggctggaacgagcaggacattgtttcacgcgtgcaggcgtatatcaccacgcaaggtcctaaaggagccctggtacatacaccggagaagacctacgatattcctggtgcacacgaacctcgtgtcgttgatccaactggttgcggcgacgcgtttcgcgccggcctgatctatggtattcagcataattatgattggttgaccattggccgcatgggaaacttaatgggtgcgctgaaagtggaacaccctggcacgcaaaatcagcgtttcgattttgccgagttcaacgaccagttcaaacaacagtttggctacgcgctc

SEQ ID NO: 346 - protein, 321 aa, synthetic construct
  REGION 1..321: note = Variant of adenosine kinase
MHHHHHHGGSGMSALICGSLAYDTIMVFPDQFKNHILCDKVHILNVSFLVPRMRREFGGCAGNIAYNLHLLGGAPIPMGTVGQDFGPYREHFETLGIDLSRVKIIDDLFTPQAFIMTDHDHNQITAFHPGAMMRSYENHVRDVPGVTLGLVGPDGREGMIQNAEEFAAGGIPFIFDPGQAMPLFNGPELREFIEQADYVVVNDYESNVLEERTGWNEQDIVSRVQAYITTQGPKGALVHTPEKTYDIPGAHEPRVVDPTGCGDAFRAGLIYGIQHNYDWLTIGRMGNLMGALKVEHPGTQNQRFDFAEFNDQFKQQFGYAL

SEQ ID NO: 347 - DNA, 963 bp, synthetic construct
  misc_feature 1..963: note = Variant of adenosine kinase
  source 1..963: mol_type = other DNA
atgcaccatcatcaccatcacgggggctccggcatgagtgcactgatttgcggttctttagcgtatgataccatcatggtgtttccggaccagttcaagaaccatattctgcccgatcgtgttcacatcctcaatgtcagctttcttgtaccacgcatgcgtcgtgaatttggaggctgtgccggcaacattgcgtacaatctgcatctgttgggtggtgctccgatccctatgggaacggtgggccaagatttcggtccgtatcgcgagcacttcgaaactctgggcattgacttatcccgcgtcaagatcatcgatgatctgtttacaccgcaggccttcattaccaccgaccatgatcataaccagattacggcgtttcatccagcggcaatgatgcgttcgtacgaaaatcacgttcgtgatgtgccgggtgttaccttgggcctcgtaggtcctgatggacgcgagggcatgatccaaaatgccgaagaatttgctgctggtggcattccgttcatttttgacccaggtcaggcactgccgctgttcaacggccccgaactgcgcgagtttatcgaacaggcggactatgtggtggtcaacgattacgaaagcaatcttcttcaagaacgtactggctggaacgagcaggacattgtttcacgcgtgcaggcgtatatcaccacgcaaggttcgaaaggagccctggtacatacaccggagaagacctacgatattccgccggcacacgaacgtcgtgtcgttgatccaactggttgcggcgacgcgtttcgcgccggcctgatctatggtattcagcataattatgattggttgaccattggccgcatgggaaacttaatgggtgcgctgaaagtggaacaccctggcacgcaaaatcagcgtttcgattttgccgaattcaacgaccagttcaaacaagattttggctacgcgctc

SEQ ID NO: 348 - protein, 321 aa, synthetic construct
  REGION 1..321: note = Variant of adenosine kinase
MHHHHHHGGSGMSALICGSLAYDTIMVFPDQFKNHILPDRVHILNVSFLVPRMRREFGGCAGNIAYNLHLLGGAPIPMGTVGQDFGPYREHFETLGIDLSRVKIIDDLFTPQAFITTDHDHNQITAFHPAAMMRSYENHVRDVPGVTLGLVGPDGREGMIQNAEEFAAGGIPFIFDPGQALPLFNGPELREFIEQADYVVVNDYESNLLQERTGWNEQDIVSRVQAYITTQGSKGALVHTPEKTYDIPPAHERRVVDPTGCGDAFRAGLIYGIQHNYDWLTIGRMGNLMGALKVEHPGTQNQRFDFAEFNDQFKQDFGYAL

SEQ ID NO: 349 - DNA, 963 bp, synthetic construct
  misc_feature 1..963: note = Variant of adenosine kinase
  source 1..963: mol_type = other DNA
atgcaccatcatcaccatcacgggggctccggcatgagtgcactgatttgcggttctttagcgtatgataccatcatggtgtttccggaccagttcaagcgtcatattctgtgcgataaagttcacatcctcaatgtcagctttcttgtaccacgcatgcgtcgtgaatttggaggctgtgccggcaacattgcgtacaatctgcatctgttgggtggtgctccgatccctatgggaacggtgggccaagatttcggtccgtatcgcgagcacttcgaaactctgggcattgacttatcccgcgtcaagatcatcgatgatctgtttacaccgcaggccttcattatgaccgaccatgatcataaccagattacggcgtttcatccaggcgcaatgatgcgttcgtacgaaaatcacgttcgtgatgtgccgggtgttaccttgggcctcgtaggtcctgatggacgcgagggcatgatccaaaatgccgaagaatttgctgctggtggcattccgttcatttttgacccaggtcaggcaatgccgctgttcaacggccccgaactgcgcgagtttatcgaacaggcggactatgtggtggtcaacgattacgaaagcaatctgcttcaggaacgtactggctggaacgagcaggacattgtttcacgcgtgcaggcgtatatcaccacgcaaggtcctaaaggagccctggtacatacaccggagaagacctacgatattccgccggcacacgaacgtcgtgtcgttgatccaactggttgcggcgacgcgtttcgcgccggcctgatctatggtattcagcataattatgattggttgaccattggccgcatgggaaacttaatgggtgcgctgaaagtggaacaccctggcacgcaaaatcagcgtttcgattttgccgagttcaacgaccagttcaaacaacagtttggctacgcgctc

SEQ ID NO: 350 - protein, 321 aa, synthetic construct
  REGION 1..321: note = Variant of adenosine kinase
MHHHHHHGGSGMSALICGSLAYDTIMVFPDQFKRHILCDKVHILNVSFLVPRMRREFGGCAGNIAYNLHLLGGAPIPMGTVGQDFGPYREHFETLGIDLSRVKIIDDLFTPQAFIMTDHDHNQITAFHPGAMMRSYENHVRDVPGVTLGLVGPDGREGMIQNAEEFAAGGIPFIFDPGQAMPLFNGPELREFIEQADYVVVNDYESNLLQERTGWNEQDIVSRVQAYITTQGPKGALVHTPEKTYDIPPAHERRVVDPTGCGDAFRAGLIYGIQHNYDWLTIGRMGNLMGALKVEHPGTQNQRFDFAEFNDQFKQQFGYAL

SEQ ID NO: 351 - DNA, 963 bp, synthetic construct
  misc_feature 1..963: note = Variant of adenosine kinase
  source 1..963: mol_type = other DNA
atgcaccatcatcaccatcacgggggctccggcatgagtgcactgatttgcggttctttagcgtatgataccatcatggtgtttccggaccagttcaagcgtcatattctgtgcgataaagttcacatcctcaatgtcagctttcttgtaccacgcatgcgtcgtgaatttggaggctgtgccggcaacattgcgtacaatctgcatctgttgggtggtgctccgatccctatgggaacggtgggccaagatttcggtccgtatcgcgagcacttcgaaactctgggcattgacttatcccgcgtcaagatcatcgatgatctgtttacaccgcaggccttcattaccaccgaccatgatcataaccagattacggcgtttcatccaggcgcaatgatgcgttcgtacgaaaatcacgttcgtgatgtgccgggtgttaccttgggcctcgtaggtcctgatggacgcgagggcatgatccaaaatgccgaagaatttgctgctggtggcattccgttcatttttgacccaggtcaggcaatgccgctgttcaacggccccgaactgcgcgagtttatcgaacaggcggactatgtggtggtcaacgattacgaaagcaatcttcttcaagaacgtactggctggaacgagcaggacattgtttcacgcgtgcaggcgtatatcaccacgcaaggtcctaaaggagccctggtacatacaccggagaagacctacgatattccgccggcacacgaacctcgtgtcgttgatccaactggttgcggcgacgcgtttcgcgccggcctgatctatggtattcagcataattatgattggttgaccattggccgcatgggaaacttaatgggtgcgctgaaagtggaacaccctggcacgcaaaatcagcgtttcgattttgccgaattcaacgaccagttcaaacaacagtttggctacgcgctc

SEQ ID NO: 352 - protein, 321 aa, synthetic construct
  REGION 1..321: note = Variant of adenosine kinase
MHHHHHHGGSGMSALICGSLAYDTIMVFPDQFKRHILCDKVHILNVSFLVPRMRREFGGCAGNIAYNLHLLGGAPIPMGTVGQDFGPYREHFETLGIDLSRVKIIDDLFTPQAFITTDHDHNQITAFHPGAMMRSYENHVRDVPGVTLGLVGPDGREGMIQNAEEFAAGGIPFIFDPGQAMPLFNGPELREFIEQADYVVVNDYESNLLQERTGWNEQDIVSRVQAYITTQGPKGALVHTPEKTYDIPPAHEPRVVDPTGCGDAFRAGLIYGIQHNYDWLTIGRMGNLMGALKVEHPGTQNQRFDFAEFNDQFKQQFGYAL

SEQ ID NO: 353 - DNA, 963 bp, synthetic construct
  misc_feature 1..963: note = Variant of adenosine kinase
  source 1..963: mol_type = other DNA
atgcaccatcatcaccatcacgggggctccggcatgagtgcactgatttgcggttctttagcgtatgataccatcatggtgtttccggaccagttcaagaaccatattctgcccgataaagttcacatcctcaatgtcagctttcttgtaccacgcatgcgtcgtgaatttggaggctgtgccggcaacattgcgtacaatctgcatctgttgggtggtgctccgatccctatgggaacggtgggccaagatttcggtccgtatcgcgagcacttcgaaactctgggcattgacttatcccgcgtcaagatcatcgatgatctgtttacaccgcaggccttcattaccaccgaccatgatcataaccagattacggcgtttcatccagcggcaatgatgcgttcgtacgaaaatcacgttcgtgatgtgccgggtgttaccttgggcctcgtaggtcctgatggacgcgagggcatgatccaaaatgccgaagaatttgctgctggtggcattccgttcatttttgacccaggtcaggcaatgccgctgttcaacggccccgaactgcgcgagtttatcgaacaggcggactatgtggtggtcaacgattacgaaagcaatcttcttcaagaacgtactggctggaacgagcaggacattgtttcacgcgtgcaggcgtatatcaccacgcaaggtcctaaaggagccctggtacatacaccggagaagacctacgatattccgccggcacacgaacgtcgtgtcgttgatccaactggttgcggcgacgcgtttcgcgccggcctgatctatggtattcagcataattatgattggttgaccattggccgcatgggaaacttaatgggtgcgctgaaagtggaacaccctggcacgcaaaatcagcgtttcgattttgccgaattcaacgaccagttcaaacaagattttggctacgcgctc

SEQ ID NO: 354 - protein, 321 aa, synthetic construct
  REGION 1..321: note = Variant of adenosine kinase
MHHHHHHGGSGMSALICGSLAYDTIMVFPDQFKNHILPDKVHILNVSFLVPRMRREFGGCAGNIAYNLHLLGGAPIPMGTVGQDFGPYREHFETLGIDLSRVKIIDDLFTPQAFITTDHDHNQITAFHPAAMMRSYENHVRDVPGVTLGLVGPDGREGMIQNAEEFAAGGIPFIFDPGQAMPLFNGPELREFIEQADYVVVNDYESNLLQERTGWNEQDIVSRVQAYITTQGPKGALVHTPEKTYDIPPAHERRVVDPTGCGDAFRAGLIYGIQHNYDWLTIGRMGNLMGALKVEHPGTQNQRFDFAEFNDQFKQDFGYAL

SEQ ID NO: 355 - DNA, 963 bp, synthetic construct
  misc_feature 1..963: note = Variant of adenosine kinase
  source 1..963: mol_type = other DNA
atgcaccatcatcaccatcacgggggctccggcatgagtgcactgatttgcggttctttagcgtatgataccatcatggtgtttccggaccagttcaagaaccatattctgcctgataaagttcacatcctcaatgtcagctttcttgtaccacgcatgcgtcgtgaatttggaggctgtgccggcaacattgcgtacaatctgcatctgttgggtggtgctccgatccctatgggaacggtgggccaagatttcggtccgtatcgcgagcacttcgaaactctgggcattgacttatcccgcgtccgtatcatcgatgatctgtttacaccgcaggccttcattaccaccgaccatgatcataaccagattacggcgtttcatccaggcgcaatgatgcgttcgtacgaaaatcacgttcgtgatgtgccgggtgttaccttgggcctcgtaggtcctgatggacgcgagggcatgatccaaaatgccgaagaatttgctgctggtggcattccgttcatttttgacccaggtcaggcaatgccgctgttcaacggccccgaactgcgcgagtttatcgaacaggcggactatgtggtggtcaacgattacgaaagcaatcttcttcaagaacgtactggctggaacgagcaggacattgtttcacgcgtgcaggcgtatatcaccacgcaaggtcctaaaggagccctggtacatacaccggagaagacctacgatattcgtggtgcacacgaacgtcgtgtcgttgatccaactggttgcggcgacgcgtttcgcgccggcctgatctatggtattcagcataattatgattggttgaccattggccgcatgggaaacttaatgggtgcgctgaaagtggaacaccctggcacgcaaaatcagcgtttcgattttgccgagttcaacgaccagttcaaacaacagtttggctacgcgctc

SEQ ID NO: 356 - protein, 321 aa, synthetic construct
  REGION 1..321: note = Variant of adenosine kinase
MHHHHHHGGSGMSALICGSLAYDTIMVFPDQFKNHILPDKVHILNVSFLVPRMRREFGGCAGNIAYNLHLLGGAPIPMGTVGQDFGPYREHFETLGIDLSRVRIIDDLFTPQAFITTDHDHNQITAFHPGAMMRSYENHVRDVPGVTLGLVGPDGREGMIQNAEEFAAGGIPFIFDPGQAMPLFNGPELREFIEQADYVVVNDYESNLLQERTGWNEQDIVSRVQAYITTQGPKGALVHTPEKTYDIRGAHERRVVDPTGCGDAFRAGLIYGIQHNYDWLTIGRMGNLMGALKVEHPGTQNQRFDFAEFNDQFKQQFGYAL

SEQ ID NO: 357 - DNA, 963 bp, synthetic construct
  misc_feature 1..963: note = Variant of adenosine kinase
  source 1..963: mol_type = other DNA
atgcaccatcatcaccatcacgggggctccggcatgagtgcactgatttgcggttctttagcgtatgataccatcatggtgtttccggaccagttcaagaaccatattctgcccgataaagttcacatcctcaatgtcagctttcttgtaccacgcatgcgtcgtgaatttggaggctgtgccggcaacattgcgtacaatctgcatctgttgggtggtgctccgatccctatgggaacggtgggccaagatttcggtccgtatcgcgagcacttcgaaactctgggcattgacttatcccgcgtccgtatcatcgatgatctgtttacaccgcaggccttcattaccaccgaccatgatcataaccagattacggcgtttcatccaggcgcaatgatgcgttcgtacgaaaatcacgttcgtgatgtgccgggtgttaccttgggcctcgtaggtcctgatggacgcgagggcatgatccaaaatgccgaagaatttgctgctggtggcattccgttcatttttgacccaggtcaggcaatgccgctgttcaacggccccgaactgcgcgagtttatcgaacaggcggactatgtggtggtcaacgattacgaaagcaatcttcttcaagaacgtactggctggaacgagcaggacattgtttcacgcgtgcaggcgtatatcaccacgcaaggtcctaaaggagccctggtacatacaccggagaagacctacgatattcgtccggcacacgaacgtcgtgtcgttgatccaactggttgcggcgacgcgtttcgcgccggcctgatctatggtattcagcataattatgattggttgaccattggccgcatgggaaacttaatgggtgcgctgaaagtggaacaccctggcacgcaaaatcagcgtttcgattttgccgaattcaacgaccagttcaaacaacagtttggctacgcgctc

SEQ ID NO: 358 - protein, 321 aa, synthetic construct
  REGION 1..321: note = Variant of adenosine kinase
MHHHHHHGGSGMSALICGSLAYDTIMVFPDQFKNHILPDKVHILNVSFLVPRMRREFGGCAGNIAYNLHLLGGAPIPMGTVGQDFGPYREHFETLGIDLSRVRIIDDLFTPQAFITTDHDHNQITAFHPGAMMRSYENHVRDVPGVTLGLVGPDGREGMIQNAEEFAAGGIPFIFDPGQAMPLFNGPELREFIEQADYVVVNDYESNLLQERTGWNEQDIVSRVQAYITTQGPKGALVHTPEKTYDIRPAHERRVVDPTGCGDAFRAGLIYGIQHNYDWLTIGRMGNLMGALKVEHPGTQNQRFDFAEFNDQFKQQFGYAL

SEQ ID NO: 359 - DNA, 963 bp, synthetic construct
  misc_feature 1..963: note = Variant of adenosine kinase
  source 1..963: mol_type = other DNA
atgcaccatcatcaccatcacgggggctccggcatgagtgcactgatttgcggttctttagcgtatgataccatcatggtgtttccggaccagttcaagaaccatattctgcccgatcgtgttcaccgcctcaatgtcagctttcttgtaccacgcatgcgtcgtgaatttggaggctgtgccggcaacattgcgtacaatctgcatctgttgggtggtgctccgatcgtaatgggtacggtgggccaagatttcggtccgtatcgcgagcacttcgaaactctgggcattgacttatcccgcgtcaagatcatcgatgatctgagtacagctcaggccttcattaccaccgaccatgatcataaccagattacggcgtttcatccaggcgcaatgatgcgttcgtacgaaaatcacgttcgtgatgtgccgggtgttaccttgggcctcgtaggtcctgatggacgcgagggcatgatccaaaatgccgaagaatttgctgctggtgatattccgttcatttttgacccaggtcaggcactgccgctgttcaacggccccgaactgcgcgagtttatcgaacaggcggactatgtggtggtcaacgattacgaaagcaatcttcttcaaacgcgtactggctggaacgagcaggacattgtttcacgcgtgcaggcgtatatcaccacgcaaggttcgaaaggagtcctggtacatacaccggagaagacctacgatattcctccggcacacgaacgtcgtgtcgttgatccaactggttgcggcgacgcgtttcgcgccggcctgatctatggtattcagcataattatgattggttgaccattggccgcatgggaaacttaatgggtgcgctgaaagtggaacaccctggcacgcaaaatcagcgtttcgattttgccgaattcaacgaccagttcaaacaagattttggctacgcgctc

SEQ ID NO: 360 - protein, 321 aa, synthetic construct
  REGION 1..321: note = Variant of adenosine kinase
MHHHHHHGGSGMSALICGSLAYDTIMVFPDQFKNHILPDRVHRLNVSFLVPRMRREFGGCAGNIAYNLHLLGGAPIVMGTVGQDFGPYREHFETLGIDLSRVKIIDDLSTAQAFITTDHDHNQITAFHPGAMMRSYENHVRDVPGVTLGLVGPDGREGMIQNAEEFAAGDIPFIFDPGQALPLFNGPELREFIEQADYVVVNDYESNLLQTRTGWNEQDIVSRVQAYITTQGSKGVLVHTPEKTYDIPPAHERRVVDPTGCGDAFRAGLIYGIQHNYDWLTIGRMGNLMGALKVEHPGTQNQRFDFAEFNDQFKQDFGYAL

SEQ ID NO: 361 - DNA, 963 bp, synthetic construct
  misc_feature 1..963: note = Variant of adenosine kinase
  source 1..963: mol_type = other DNA
atgcaccatcatcaccatcacgggggctccggcatgagtgcactgatttgcggttctttagcgtatgataccatcatggtgtttccggaccagttcaagaaccatattctgcccgatcgtgttcaccgcctcaatgtcagctttcttgtaccacgcatgcgtcgtgaatttggaggctgtgccggcaacattgcgtacaatctgcatctgttgggtggtgctccgatcgtaatgggtacggtgggccaagatttcggtccgtatcgcgagcacttcgaaactctgggcattgacttatcccgcgtcaagatcatcgatgatctgagtacagctcaggccttcattaccaccgaccatgatcataaccagattacggcgtttcatccaggcgcaatgatgcgttcgtacgaaaatcacgttcgtgatgtgccgggtgttaccttgggcctcgtaggtcctgatggacgcgagggcatgatccaaaatgccgaagaatttgctgctggtggcattccgttcatttttgacccaggtcaggcactgccgctgttcaacggccccgaactgcgcgagtttatcgaacaggcggactatgtggtggtcaacgattacgaaagcaatcttcttcaaacgcgtactggctggaacgagcaggacattgtttcacgcgtgcaggcgtatatcaccacgcaaggttcgaaaggagccctggtacatacaccggagaagacctacgatattccgccggcacacgaacgtcgtgtcgttgatccaactggttgcggcgacgcgtttcgcgccggcctgatctatggtattcagcataattatgattggttgaccattggccgcatgggaaacttaatgggtgcgctgaaagtggaacaccctggcacgcaaaatcagcgtttcgattttgccgaattcaacgaccagttcaaacaagattttggctacgcgctc

SEQ ID NO: 362 - protein, 321 aa, synthetic construct
  REGION 1..321: note = Variant of adenosine kinase
MHHHHHHGGSGMSALICGSLAYDTIMVFPDQFKNHILPDRVHRLNVSFLVPRMRREFGGCAGNIAYNLHLLGGAPIVMGTVGQDFGPYREHFETLGIDLSRVKIIDDLSTAQAFITTDHDHNQITAFHPGAMMRSYENHVRDVPGVTLGLVGPDGREGMIQNAEEFAAGGIPFIFDPGQALPLFNGPELREFIEQADYVVVNDYESNLLQTRTGWNEQDIVSRVQAYITTQGSKGALVHTPEKTYDIPPAHERRVVDPTGCGDAFRAGLIYGIQHNYDWLTIGRMGNLMGALKVEHPGTQNQRFDFAEFNDQFKQDFGYAL

SEQ ID NO: 363 - DNA, 963 bp, synthetic construct
  misc_feature 1..963: note = Variant of adenosine kinase
  source 1..963: mol_type = other DNA
atgcaccatcatcaccatcacgggggctccggcatgagtgcactgatttgcggttctttagcgtatgataccatcatggtgtttccggaccagttcaagaaccatattctgcccgatcgtgttcaccgcctcaatgtcagctttcttgtaccacgcatgcgtcgtgaatttggaggctgtgccggcaacattgcgtacaatctgcatctgttgggtggtgctccgatcgtaatgggtacggtgggccaagatttcgggccgtatcgcgagcacttcgaaactctgggcattgacttatcccgcgtcaagatcatcgatgatctgagtacacctcaggccttcattaccaccgaccatgatcataaccagattacggcgtttcatccaggcgcaatgatgcgttcgtacgaaaatcacgttcgtgatgtgccgggtgttaccttgggcctcgtaggtcctgatggacgcgagggcatgatccaaaatgccgaagaatttgctgctggtggtattccgttcatttttgacccaggtcaggcactgccgctgttcaacggccccgaactgcgcgagtttatcgaacaggcggactatgtggtggtcaacgattacgaaagcaatcttcttcaaacgcgtactggctggaacgagcaggacattgtttcacgcgtgcaggcgtatatcaccacgcaaggttcgaaaggagccctggtacatacaccggagaagacctacgatattccgccggcacacgaacgtcgtgtcgttgatccaactggttgcggcgacgcgtttcgcgccggcctgatctatggtattcagcataattatgattggttgaccattggccgcatgggaaacttaatgggtgcgctgaaagtggaacaccctggcacgcaaaatcagcgtttcgattttgccgaattcaacgaccagttcaaacaagattttggctacgcgctc

SEQ ID NO: 364 - protein, 321 aa, synthetic construct
  REGION 1..321: note = Variant of adenosine kinase
MHHHHHHGGSGMSALICGSLAYDTIMVFPDQFKNHILPDRVHRLNVSFLVPRMRREFGGCAGNIAYNLHLLGGAPIVMGTVGQDFGPYREHFETLGIDLSRVKIIDDLSTPQAFITTDHDHNQITAFHPGAMMRSYENHVRDVPGVTLGLVGPDGREGMIQNAEEFAAGGIPFIFDPGQALPLFNGPELREFIEQADYVVVNDYESNLLQTRTGWNEQDIVSRVQAYITTQGSKGALVHTPEKTYDIPPAHERRVVDPTGCGDAFRAGLIYGIQHNYDWLTIGRMGNLMGALKVEHPGTQNQRFDFAEFNDQFKQDFGYAL

SEQ ID NO: 365 - DNA, 963 bp, synthetic construct
  misc_feature 1..963: note = Variant of adenosine kinase
  source 1..963: mol_type = other DNA
atgcaccatcatcaccatcacgggggctccggcatgagtgcactgatttgcggttctttagcgtatgataccatcatggtgtttccggaccagttcaagaaccatattctgcccgatcgtgttcaccgcctcaatgtcagctttcttgtaccacgcctgcgtcgtgaatttggaggctgtgccggcaacattgcgtacaatctgcatctgttgggtggtgctccgatcgtaatgggtacggtgggccaagatttcgggccgtatcgcgagcacttcgaaactctgggcattgacttatcccgcgtcaagatcatcgatgatctgagtacacctcaggccttcattaccaccgaccatgatcataaccagattacggcgtttcatccaggcgcaatgatgcgttcgtacgaaaatcacgttcgtgatgtgccgggtgttaccttgggcctcgtaggtcctgatggacgcgagggcatgatccaaaatgccgaagaatttgctgctggtgatattccgttcatttttgacccaggtcaggcactgccgctgttcaacggccccgaactgcgcgagtttatcgaacaggcggactatgtggtggtcaacgattacgaaagcaatcttcttcaaacgcgtactggctggaacgagcaggacattgtttcacgcgtgcaggcgtatatcaccacgcaaggttcgaaaggagccctggtacatacaccggagaagacctacgatattccgccggcacacgaacgtcgtgtcgttgatccaactggttgcggcgacgcgtttcgcgccggcctgatctatggtattcagcataattatgattggttgaccattggccgcatgggaaacttaatgggtgcgctgaaagtggaacaccctggcacgcaaaatcagcgtttcgattttgccgaattcaacgaccagttcaaacaagattttggctactcgctc

SEQ ID NO: 366 - protein, 321 aa, synthetic construct
  REGION 1..321: note = Variant of adenosine kinase
MHHHHHHGGSGMSALICGSLAYDTIMVFPDQFKNHILPDRVHRLNVSFLVPRLRREFGGCAGNIAYNLHLLGGAPIVMGTVGQDFGPYREHFETLGIDLSRVKIIDDLSTPQAFITTDHDHNQITAFHPGAMMRSYENHVRDVPGVTLGLVGPDGREGMIQNAEEFAAGDIPFIFDPGQALPLFNGPELREFIEQADYVVVNDYESNLLQTRTGWNEQDIVSRVQAYITTQGSKGALVHTPEKTYDIPPAHERRVVDPTGCGDAFRAGLIYGIQHNYDWLTIGRMGNLMGALKVEHPGTQNQRFDFAEFNDQFKQDFGYSL

SEQ ID NO: 367 - DNA, 963 bp, synthetic construct
  misc_feature 1..963: note = Variant of adenosine kinase
  source 1..963: mol_type = other DNA
atgcaccatcatcaccatcacgggggctccggcatgagtgcactgatttgcggttctttagcgtatgataccatcatggtgtttccggaccagttcaagaaccatattctgcccgatcgtgttcaccgcctcaatgtcagctttcttgtaccacgcctgcgtcgtgaatttggaggctgtgccggcaacattgcgtacaatctgcatctgttgggtggtgctccgatcgtaatgggtacggtgggccaagatttcgggccgtatcgcgagcacttcgaaactctgggcattgacttatcccgcgtcaagatcatcgatgatctgagtacaccgcaggccttcattaccaccgaccatgatcataaccagattacggcgtttcatccaggcgcaatgatgcgttcgtacgaaaatcacgttcgtgatgtgccgggtgttaccttgggcctcgtaggtcctgatggacgcgagggcatgatccaaaatgccgaagaatttgctgctggtggcattccgttcatttttgacccaggtcaggcactgccgctgttcaacggccccgaactgcgcgagtttatcgaacaggcggactatgtggtggtcaacgattacgaaagcaatcttcttcaaacgcgtactggctggaacgagcaggacattgtttcacgcgtgcaggcgtatatcaccacgcaaggttcgcgcggagccctggtacatacaccggagaagacctacgatattcctccggcacacgaacgtcgtgtcgttgatccaactggttgcggcgacgcgtttcgcgccggcctgatctatggtattcagcataattatgattggttgaccattggccgcatgggaaacttaatgggtgcgctgaaagtggaacaccctggcacgcaaaatcagcgtttcgattttgccgaattcaacgaccagttcaaacaagattttggctactcgctc

SEQ ID NO: 368 - protein, 321 aa, synthetic construct
  REGION 1..321: note = Variant of adenosine kinase
MHHHHHHGGSGMSALICGSLAYDTIMVFPDQFKNHILPDRVHRLNVSFLVPRLRREFGGCAGNIAYNLHLLGGAPIVMGTVGQDFGPYREHFETLGIDLSRVKIIDDLSTPQAFITTDHDHNQITAFHPGAMMRSYENHVRDVPGVTLGLVGPDGREGMIQNAEEFAAGGIPFIFDPGQALPLFNGPELREFIEQADYVVVNDYESNLLQTRTGWNEQDIVSRVQAYITTQGSRGALVHTPEKTYDIPPAHERRVVDPTGCGDAFRAGLIYGIQHNYDWLTIGRMGNLMGALKVEHPGTQNQRFDFAEFNDQFKQDFGYSL

SEQ ID NO: 369 - DNA, 963 bp, synthetic construct
  misc_feature 1..963: note = Variant of adenosine kinase
  source 1..963: mol_type = other DNA
atgcaccatcatcaccatcacgggggctccggcatgagtgcactgatttgcggttctttagcgtatgataccatcatggtgtttccggaccagttcaagaaccatattctgcccgatcgtgttcaccgcctcaatgtcagctttcttgtaccacgcatgcgtcgtgaatttggaggctgtgccggcaacattgcgtacaatctgcatctgttgggtggtgctccgatcgtaatggctacggtgggccaagatttcggtccgtatcgcgagcacttcgaaactctgggcattgacttatcccgcgtcaagatcatcgatgatctgagtacaccgcaggccttcattaccaccgaccatgatcataaccagattacggcgtttcatccaggcgcaatgatgcgttcgtacgaaaatcacgttcgtgatgtgccgggtgttaccttgggcctcgtaggtcctgatggacgcgagggcatgatccaaaatgccgaagaatttgctgctggtggcattccgttcatttttgacccaggtcaggcactgccgctgttcaacggccccgaactgcgcgagtttatcgaacaggcggactatgtggtggtcaacgattacgaaagcaatcttcttcaaacgcgtactggctggaacgagcaggacattgtttcacgcgtgcaggcgtatatcaccacgcaaggttcgaaaggagccctggtacatacaccggagaagacctacgatattccgccggcacacgaacgtcgtgtcgttgatccaactggttgcggcgacgcgtttcgcgccggcctgatctatggtattcagcataattatgattggttgaccattggccgcatgggaaacttaatgggtgcgctgaaagtggaacaccctggcacgcaaaatcagcgtttcgattttgccgaattcaacgaccagttcaaacaatattttggctacgcgctc

SEQ ID NO: 370 - protein, 321 aa, synthetic construct
  REGION 1..321: note = Variant of adenosine kinase
MHHHHHHGGSGMSALICGSLAYDTIMVFPDQFKNHILPDRVHRLNVSFLVPRMRREFGGCAGNIAYNLHLLGGAPIVMATVGQDFGPYREHFETLGIDLSRVKIIDDLSTPQAFITTDHDHNQITAFHPGAMMRSYENHVRDVPGVTLGLVGPDGREGMIQNAEEFAAGGIPFIFDPGQALPLFNGPELREFIEQADYVVVNDYESNLLQTRTGWNEQDIVSRVQAYITTQGSKGALVHTPEKTYDIPPAHERRVVDPTGCGDAFRAGLIYGIQHNYDWLTIGRMGNLMGALKVEHPGTQNQRFDFAEFNDQFKQYFGYAL

SEQ ID NO: 371 - DNA, 963 bp, synthetic construct
  misc_feature 1..963: note = Variant of adenosine kinase
  source 1..963: mol_type = other DNA
atgcaccatcatcaccatcacgggggctccggcatgagtgcactgatttgcggttctttagcgtatgataccatcatggtgtttccggaccagttcaagaaccatattctgcccgatcgtgttcaccgcctcaatgtcagctttcttgtaccacgcatgcgtcgtgaatttggaggctgtgccggcaacattgcgtacaatctgcatctgttgggtggtgctccgatcgtaatgggtacggtgggccaagatttcgggccgtatcgcgagcacttcgaaactctgggcattgacttatcccgcgtcaagatcatcgatgatctgagtacagctcaggccttcattaccaccgaccatgatcataaccagattacggcgtttcatccaggcgcaatgatgcgttcgtacgaaaatcacgttcgtgatgtgccgggtgttaccttgggcctcgtaggtcctgatggacgcgagggcatgatccaaaatgccgaagaatttgctgctggtggcattccgttcatttttgacccaggtcaggcactgccgctgttcaacggccccgaactgcgcgagtttatcgaacaggcggactatgtggtggtcaacgattacgaaagcaatcttcttcaagaacgtactggctggaacgagcaggacattgtttcacgcgtgcaggcgtatatcaccacgcaaggttcgcgcggagtcctggtacatacaccggagaagacctacgatattccgccggcacacgaacgtcgtgtcgttgatccaactggttgcggcgacgcgtttcgcgccggcctgatctatggtattcagcataattatgattggttgaccattggccgcatgggaaacttaatgggtgcgctgaaagtggaacaccctggcacgcaaaatcagcgtttcgattttgccctgttcaacgaccagttcaaacaagattttggctacgcgctc

SEQ ID NO: 372 - protein, 321 aa, synthetic construct
  REGION 1..321: note = Variant of adenosine kinase
MHHHHHHGGSGMSALICGSLAYDTIMVFPDQFKNHILPDRVHRLNVSFLVPRMRREFGGCAGNIAYNLHLLGGAPIVMGTVGQDFGPYREHFETLGIDLSRVKIIDDLSTAQAFITTDHDHNQITAFHPGAMMRSYENHVRDVPGVTLGLVGPDGREGMIQNAEEFAAGGIPFIFDPGQALPLFNGPELREFIEQADYVVVNDYESNLLQERTGWNEQDIVSRVQAYITTQGSRGVLVHTPEKTYDIPPAHERRVVDPTGCGDAFRAGLIYGIQHNYDWLTIGRMGNLMGALKVEHPGTQNQRFDFALFNDQFKQDFGYAL

SEQ ID NO: 373 - DNA, 963 bp, synthetic construct
  misc_feature 1..963: note = Variant of adenosine kinase
  source 1..963: mol_type = other DNA
atgcaccatcatcaccatcacgggggctccggcatgagtgcactgatttgcggttctttagcgtatgataccatcatggtgtttccggaccagttcaagaaccatattctgcccgatcgtgttcaccgcctcaatgtcagctttcttgtaccacgcatgcgtcgtgaatttggaggctgtgccggcaacattgcgtacaatctgcatctgttgggtggtgctccgatcccaatgggtacggtgggccaagatttcgggccgtatcgcgagcacttcgaaactctgggcattgacttatcccgcgtcaagatcatcgatgatctgagtacagctcaggccttcattaccaccgaccatgatcataaccagattacggcgtttcatccaggcgcaatgatgcgttcgtacgaaaatcacgttcgtgatgtgccgggtgttaccttgggcctcgtaggtcctgatggacgcgagggcatgatccaaaatgccgaagaatttgctgctggtgatattccgttcatttttgacccaggtcaggcactgccgctgttcaacggccccgaactgcgcgagtttatcgaacaggcggactatgtggtggtcaacgattacgaaagcaatcttcttcaaacgcgtactggctggaacgagcaggacattgtttcacgcgtgcaggcgtatatcaccacgcaaggttcgcgcggagtcctggtacatacaccggagaagacctacgatattcgtccggcacacgaacgtcgtgtcgttgatccaactggttgcggcgacgcgtttcgcgccggcctgatctatggtattcagcataattatgattggttgaccattggccgcatgggaaacttaatgggtgcgctgaaagtggaacaccctggcacgcaaaatcagcgtttcgattttgccgaattcaacgaccagttcaaacaagattttggctacgcgctc

SEQ ID NO: 374 - protein, 321 aa, synthetic construct
  REGION 1..321: note = Variant of adenosine kinase
MHHHHHHGGSGMSALICGSLAYDTIMVFPDQFKNHILPDRVHRLNVSFLVPRMRREFGGCAGNIAYNLHLLGGAPIPMGTVGQDFGPYREHFETLGIDLSRVKIIDDLSTAQAFITTDHDHNQITAFHPGAMMRSYENHVRDVPGVTLGLVGPDGREGMIQNAEEFAAGDIPFIFDPGQALPLFNGPELREFIEQADYVVVNDYESNLLQTRTGWNEQDIVSRVQAYITTQGSRGVLVHTPEKTYDIRPAHERRVVDPTGCGDAFRAGLIYGIQHNYDWLTIGRMGNLMGALKVEHPGTQNQRFDFAEFNDQFKQDFGYAL

SEQ ID NO: 375 - DNA, 963 bp, synthetic construct
  misc_feature 1..963: note = Variant of adenosine kinase
  source 1..963: mol_type = other DNA
atgcaccatcatcaccatcacgggggctccggcatgagtgcactgatttgcggttctttagcgtatgataccatcatggtgtttccggaccagttcaagaaccatattctgcccgatcgtgttcaccgcctcaatgtcagctttcttgtaccacgcatgcgtcgtgaatttggaggctgtgccggcaacattgcgtacaatctgcatctgttgggtggtgctccgatcccaatgggtacggtgggccaagatttcgggccgtatcgcgagcacttcgaaactctgggcattgacttatcccgcgtcaagatcatcgatgatctgagtacagctcaggccttcattaccaccgaccatgatcataaccagattacggcgtttcatccaggcgcaatgatgcgttcgtacgaaaatcacgttcgtgatgtgccgggtgttaccttgggcctcgtaggtcctgatggacgcgagggcatgatccaaaatgccgaagaatttgctgctgctgatattccgttcatttttgacccaggtcaggcactgccgctgttcaacggccccgaactgcgcgagtttatcgaacaggcggactatgtggtggtcaacgattacgaaagcaatcttcttcaagagcgtactggctggaacgagcaggacattgtttcacgcgtgcaggcgtatatcaccacgcaaggttcgcgcggagtcctggtacatacaccggagaagacctacgatattcgtccggcacacgaacgtcgtgtcgttgatccaactggttgcggcgacgcgtttcgcgccggcctgatctatggtattcagcataattatgattggttgaccattggccgcatgggaaacttaatgggtgcgctgaaagtggaacaccctggcacgcaaaatcagcgtttcgattttgccgaattcaacgaccagttcaaacaagattttggctacgcgctc

SEQ ID NO: 376 - protein, 321 aa, synthetic construct
  REGION 1..321: note = Variant of adenosine kinase
MHHHHHHGGSGMSALICGSLAYDTIMVFPDQFKNHILPDRVHRLNVSFLVPRMRREFGGCAGNIAYNLHLLGGAPIPMGTVGQDFGPYREHFETLGIDLSRVKIIDDLSTAQAFITTDHDHNQITAFHPGAMMRSYENHVRDVPGVTLGLVGPDGREGMIQNAEEFAAADIPFIFDPGQALPLFNGPELREFIEQADYVVVNDYESNLLQERTGWNEQDIVSRVQAYITTQGSRGVLVHTPEKTYDIRPAHERRVVDPTGCGDAFRAGLIYGIQHNYDWLTIGRMGNLMGALKVEHPGTQNQRFDFAEFNDQFKQDFGYAL

SEQ ID NO: 377 - DNA, 963 bp, synthetic construct
  misc_feature 1..963: note = Variant of adenosine kinase
  source 1..963: mol_type = other DNA
atgcaccatcatcaccatcacgggggctccggcatgagtgcactgatttgcggttctttagcgtatgataccatcatggtgtttccggaccagttcaagaaccatattctgcccgatcgtgttcaccgcctcaatgtcagctttcttgtaccacgcatgcgtcgtgaatttggaggctgtgccggcaacattgcgtacaatctgcatctgttgggtggtgctccgatcgtaatgggtacggtgggccaagatttcgggccgtatcgcgagcacttcgaaactctgggcattgacttatcccgcgtcaagatcatcgatgatctgagtacaccgcaggccttcattaccaccgaccatgatcataaccagattacggcgtttcatccaggcgcaatgatgcgttcgtacgaaaatcacgttcgtgatgtgccgggtgttaccttgggcctcgtaggtcctgatggacgcgagggcatgatccaaaatgccgaagaatttgctgctggtggtattccgttcatttttgacccaggtcaggcactgccgctgttcaacggccccgaactgcgcgagtttatcgaacaggcggactatgtggtggtcaacgattacgaaagcaatcttcttcaaacgcgtactggctggaacgagcaggacattgtttcacgcgtgcaggcgtatatcaccacgcaaggttcgaaaggagccctggtacatacaccggagaagacctacgatattcgtccggcacacgaacgtcgtgtcgttgatccaactggttgcggcgacgcgtttcgcgccggcctgatctatggtattcagcataattatgattggttgaccattggccgcatgggaaacttaatgggtgcgctgaaagtggaacaccctggcacgcaaaatcagcgtttcgattttgccgaattcaacgaccagttcaaacaagattttggctactcgctc

SEQ ID NO: 378 - protein, 321 aa, synthetic construct
  REGION 1..321: note = Variant of adenosine kinase
MHHHHHHGGSGMSALICGSLAYDTIMVFPDQFKNHILPDRVHRLNVSFLVPRMRREFGGCAGNIAYNLHLLGGAPIVMGTVGQDFGPYREHFETLGIDLSRVKIIDDLSTPQAFITTDHDHNQITAFHPGAMMRSYENHVRDVPGVTLGLVGPDGREGMIQNAEEFAAGGIPFIFDPGQALPLFNGPELREFIEQADYVVVNDYESNLLQTRTGWNEQDIVSRVQAYITTQGSKGALVHTPEKTYDIRPAHERRVVDPTGCGDAFRAGLIYGIQHNYDWLTIGRMGNLMGALKVEHPGTQNQRFDFAEFNDQFKQDFGYSL

SEQ ID NO: 379 - DNA, 963 bp, synthetic construct
  misc_feature 1..963: note = Variant of adenosine kinase
  source 1..963: mol_type = other DNA
atgcaccatcatcaccatcacgggggctccggcatgagtgcactgatttgcggttctttagcgtatgataccatcatggtgtttccggaccagttcaagaaccatattctgcccgatcgtgttcaccgcctcaatgtcagctttcttgtaccacgcctgcgtcgtgaatttggaggctgtgccggcaacattgcgtacaatctgcatctgttgggtggtgctccgatcccaatgggtacggtgggccaagatttcggtccgtatcgcgagcacttcgaaactctgggcattgacttatcccgcgtcaagatcatcgatgatctgagtacacctcaggccttcattaccaccgaccatgatcataaccagattacggcgtttcatccaggcgcaatgatgcgttcgtacgaaaatcacgttcgtgatgtgccgggtgttaccttgggcctcgtaggtcctgatggacgcgagggcatgatccaaaatgccgaagaatttgctgctgctgatattccgttcatttttgacccaggtcaggcactgccgctgttcaacggccccgaactgcgcgagtttatcgaacaggcggactatgtggtggtcaacgattacgaaagcaatcttcttcaagaacgtactggctggaacgagcaggacattgtttcacgcgtgcaggcgtatatcaccacgcaaggttcgcgcggagccctggtacatacaccggagaagacctacgatattcctccggcacacgaacgtcgtgtcgttgatccaactggttgcggcgacgcgtttcgcgccggcctgatctatggtattcagcataattatgattggttgaccattggccgcatgggaaacttaatgggtgcgctgaaagtggaacaccctggcacgcaaaatcagcgtttcgattttgccgaattcaacgaccagttcaaacaagattttggctactcgctc

SEQ ID NO: 380 - protein, 321 aa, synthetic construct
  REGION 1..321: note = Variant of adenosine kinase
MHHHHHHGGSGMSALICGSLAYDTIMVFPDQFKNHILPDRVHRLNVSFLVPRLRREFGGCAGNIAYNLHLLGGAPIPMGTVGQDFGPYREHFETLGIDLSRVKIIDDLSTPQAFITTDHDHNQITAFHPGAMMRSYENHVRDVPGVTLGLVGPDGREGMIQNAEEFAAADIPFIFDPGQALPLFNGPELREFIEQADYVVVNDYESNLLQERTGWNEQDIVSRVQAYITTQGSRGALVHTPEKTYDIPPAHERRVVDPTGCGDAFRAGLIYGIQHNYDWLTIGRMGNLMGALKVEHPGTQNQRFDFAEFNDQFKQDFGYSL

SEQ ID NO: 381 - DNA, 963 bp, synthetic construct
  misc_feature 1..963: note = Variant of adenosine kinase
  source 1..963: mol_type = other DNA
atgcaccatcatcaccatcacgggggctccggcatgagtgcactgatttgcggttctttagcgtatgataccatcatggtgtttccggaccagttcaagaaccatattctgcccgatcgtgttcaccgcctcaatgtcagctttcttgtaccacgcatgcgtcgtgaatttggaggctgtgccggcaacattgcgtacaatctgcatctgttgggtggtgctccgatcccaatgggtacggtgggccaagatttcgggccgtatcgcgagcacttcgaaactctgggcattgacttatcccgcgtcaagatcatcgatgatctgagtacagctcaggccttcattaccaccgaccatgatcataaccagattacggcgtttcatccaggcgcaatgatgcgttcgtacgaaaatcacgttcgtgatgtgccgggtgttaccttgggcctcgtaggtcctgatggacgcgagggcatgatccaaaatgccgaagaatttgctgctggtggtattccgttcatttttgacccaggtcaggcactgccgctgttcaacggccccgaactgcgcgagtttatcgaacaggcggactatgtggtggtcaacgattacgaaagcaatcttcttcaaacgcgtactggctggaacgagcaggacattgtttcacgcgtgcaggcgtatatcaccacgcaaggttcgcgcggagtcctggtacatacaccggagaagacctacgatattcgtccggcacacgaacgtcgtgtcgttgatccaactggttgcggcgacgcgtttcgcgccggcctgatctatggtattcagcataattatgattggttgaccattggccgcatgggaaacttaatgggtgcgctgaaagtggaacaccctggcacgcaaaatcagcgtttcgattttgccgaattcaacgaccagttcaaacaagattttggctacgcgctc

SEQ ID NO: 382 - protein, 321 aa, synthetic construct
  REGION 1..321: note = Variant of adenosine kinase
MHHHHHHGGSGMSALICGSLAYDTIMVFPDQFKNHILPDRVHRLNVSFLVPRMRREFGGCAGNIAYNLHLLGGAPIPMGTVGQDFGPYREHFETLGIDLSRVKIIDDLSTAQAFITTDHDHNQITAFHPGAMMRSYENHVRDVPGVTLGLVGPDGREGMIQNAEEFAAGGIPFIFDPGQALPLFNGPELREFIEQADYVVVNDYESNLLQTRTGWNEQDIVSRVQAYITTQGSRGVLVHTPEKTYDIRPAHERRVVDPTGCGDAFRAGLIYGIQHNYDWLTIGRMGNLMGALKVEHPGTQNQRFDFAEFNDQFKQDFGYAL

SEQ ID NO: 383 - DNA, 963 bp, synthetic construct
  misc_feature 1..963: note = Variant of adenosine kinase
  source 1..963: mol_type = other DNA
atgcaccatcatcaccatcacgggggctccggcatgagtgcactgatttgcggttctttagcgtatgataccatcatggtgtttccggaccagttcaagaaccatattctgcccgatcgtgttcaccgcctcaatgtcagctttcttgtaccacgcatgcgtcgtgaatttggaggctgtgccggcaacattgcgtacaatctgcatctgttgggtggtgctccgatcgtaatgggtacggtgggccaagatttcgggccgtatcgcgagcacttcgaaactctgggcattgacttatcccgcgtcaagatcatcgatgatctgagtacaccgcaggccttcattaccaccgaccatgatcataaccagattacggcgtttcatccaggcgcaatgatgcgttcgtacgaaaatcacgttcgtgatgtgccgggtgttaccttgggcctcgtaggtcctgatggacgcgagggcatgatccaaaatgccgaagaatttgctgctggtggcattccgttcatttttgacccaggtcaggcactgccgctgttcaacggccccgaactgcgcgagtttatcgaacaggcggactatgtggtggtcaacgattacgaaagcaatcttcttcaagaacgtactggctggaacgagcaggacattgtttcacgcgtgcaggcgtatatcaccacgcaaggttcgaaaggagccctggtacatacaccggagaagacctacgatattccgccggcacacgaacgtcgtgtcgttgatccaactggttgcggcgacgcgtttcgcgccggcctgatctatggtattcagcataattatgattggttgaccattggccgcatgggaaacttaatgggtgcgctgaaagtggaacaccctggcacgcaaaatcagcgtttcgattttgccgaattcaacgaccagttcaaacaagattttggctacgcgctc

SEQ ID NO: 384 - protein, 321 aa, synthetic construct
  REGION 1..321: note = Variant of adenosine kinase
MHHHHHHGGSGMSALICGSLAYDTIMVFPDQFKNHILPDRVHRLNVSFLVPRMRREFGGCAGNIAYNLHLLGGAPIVMGTVGQDFGPYREHFETLGIDLSRVKIIDDLSTPQAFITTDHDHNQITAFHPGAMMRSYENHVRDVPGVTLGLVGPDGREGMIQNAEEFAAGGIPFIFDPGQALPLFNGPELREFIEQADYVVVNDYESNLLQERTGWNEQDIVSRVQAYITTQGSKGALVHTPEKTYDIPPAHERRVVDPTGCGDAFRAGLIYGIQHNYDWLTIGRMGNLMGALKVEHPGTQNQRFDFAEFNDQFKQDFGYAL

SEQ ID NO: 385 - DNA, 963 bp, synthetic construct
  misc_feature 1..963: note = Variant of adenosine kinase
  source 1..963: mol_type = other DNA
atgcaccatcatcaccatcacgggggctccggcatgagtgcactgatttgcggttctttagcgtatgataccatcatggtgtttccggaccagttcaagaaccatattctgcccgatcgtgttcaccgcctcaatgtcagctttcttgtaccacgcctgcgtcgtgaatttggaggctgtgccggcaacattgcgtacaatctgcatctgttgggtggtgctccgatcgtaatgggtacggtgggccaagatttcgggccgtatcgcgagcacttcgaaactctgggcattgacttatcccgcgtcaagatcatcgatgatctgagtacagctcaggccttcattaccaccgaccatgatcataaccagattacggcgtttcatccaggcgcaatgatgcgttcgtacgaaaatcacgttcgtgatgtgccgggtgttaccttgggcctcgtaggtcctgatggacgcgagggcatgatccaaaatgccgaagaatttgctgctggtgatattccgttcatttttgacccaggtcaggcactgccgctgttcaacggccccgaactgcgcgagtttatcgaacaggcggactatgtggtggtcaacgattacgaaagcaatcttcttcaagagcgtactggctggaacgagcaggacattgtttcacgcgtgcaggcgtatatcaccacgcaaggttcgaaaggagccctggtacatacaccggagaagacctacgatattcgtccggcacacgaacgtcgtgtcgttgatccaactggttgcggcgacgcgtttcgcgccggcctgatctatggtattcagcataattatgattggttgaccattggccgcatgggaaacttaatgggtgcgctgaaagtggaacaccctggcacgcaaaatcagcgtttcgattttgccgaattcaacgaccagttcaaacaagattttggctacgcgctc

SEQ ID NO: 386 - protein, 321 aa, synthetic construct
  REGION 1..321: note = Variant of adenosine kinase
MHHHHHHGGSGMSALICGSLAYDTIMVFPDQFKNHILPDRVHRLNVSFLVPRLRREFGGCAGNIAYNLHLLGGAPIVMGTVGQDFGPYREHFETLGIDLSRVKIIDDLSTAQAFITTDHDHNQITAFHPGAMMRSYENHVRDVPGVTLGLVGPDGREGMIQNAEEFAAGDIPFIFDPGQALPLFNGPELREFIEQADYVVVNDYESNLLQERTGWNEQDIVSRVQAYITTQGSKGALVHTPEKTYDIRPAHERRVVDPTGCGDAFRAGLIYGIQHNYDWLTIGRMGNLMGALKVEHPGTQNQRFDFAEFNDQFKQDFGYAL

SEQ ID NO: 387 - DNA, 963 bp, synthetic construct
  misc_feature 1..963: note = Variant of adenosine kinase
  source 1..963: mol_type = other DNA
atgcaccatcatcaccatcacgggggctccggcatgagtgcactgatttgcggttctttagcgtatgataccatcatggtgtttccggaccagttcaagaaccatattctgcccgatcgtgttcaccgcctcaatgtcagctttcttgtaccacgcatgcgtcgtgaatttggaggctgtgccggcaacattgcgtacaatctgcatctgttgggtggtgctccgatcccaatgggtacggtgggccaagatttcggtccgtatcgcgagcacttcgaaactctgggcattgacttatcccgcgtcaagatcatcgatgatctgagtacaccgcaggccttcattaccaccgaccatgatcataaccagattacggcgtttcatccaggcgcaatgatgcgttcgtacgaaaatcacgttcgtgatgtgccgggtgttaccttgggcctcgtaggtcctgatggacgcgagggcatgatccaaaatgccgaagaatttgctgctggtggcattccgttcatttttgacccaggtcaggcactgccgctgttcaacggccccgaactgcgcgagtttatcgaacaggcggactatgtggtggtcaacgattacgaaagcaatcttcttcaaacgcgtactggctggaacgagcaggacattgtttcacgcgtgcaggcgtatatcaccacgcaaggttcgcgcggagccctggtacatacaccggagaagacctacgatattcgtccggcacacgaacgtcgtgtcgttgatccaactggttgcggcgacgcgtttcgcgccggcctgatctatggtattcagcataattatgattggttgaccattggccgcatgggaaacttaatgggtgcgctgaaagtggaacaccctggcacgcaaaatcagcgtttcgattttgccgaattcaacgaccagttcaaacaagattttggctacgcgctc

SEQ ID NO: 388 - protein, 321 aa, synthetic construct
  REGION 1..321: note = Variant of adenosine kinase
MHHHHHHGGSGMSALICGSLAYDTIMVFPDQFKNHILPDRVHRLNVSFLVPRMRREFGGCAGNIAYNLHLLGGAPIPMGTVGQDFGPYREHFETLGIDLSRVKIIDDLSTPQAFITTDHDHNQITAFHPGAMMRSYENHVRDVPGVTLGLVGPDGREGMIQNAEEFAAGGIPFIFDPGQALPLFNGPELREFIEQADYVVVNDYESNLLQTRTGWNEQDIVSRVQAYITTQGSRGALVHTPEKTYDIRPAHERRVVDPTGCGDAFRAGLIYGIQHNYDWLTIGRMGNLMGALKVEHPGTQNQRFDFAEFNDQFKQDFGYAL

SEQ ID NO: 389 - DNA, 963 bp, synthetic construct
  misc_feature 1..963: note = Variant of adenosine kinase
  source 1..963: mol_type = other DNA
atgcaccatcatcaccatcacgggggctccggcatgagtgcactgatttgcggttctttagcgtatgataccatcatggtgtttccggaccagttcaagaaccatattctgcccgatcgtgttcaccgcctcaatgtcagctttcttgtaccacgcatgcgtcgtgaatttggaggctgtgccggcaacattgcgtacaatctgcatctgttgggtggtgctccgatcgtaatgggtacggtgggccaagatttccagccatatcgcgagcacttcgaaactctgggcattgacttatcccgcgtcaagatcatcgatgatctgagtacaccgcaggccttcattaccaccgaccatgatcataaccagattacggcgtttcatccaggcgcaatgatgcgttcgtacgaaaatcacgttcgtgatgtgccgggtgttaccttgggcctcgtaggtcctgatggacgcgagggcatgatccaaaatgccgaagaatttgctgctggtgatattccgttcatttttgacccaggtcaggcactgccgctgttcaacggccccgaactgcgcgagtttatcgaacaggcggactatgtggtggtcaacgattacgaaagcaatcttcttcaaacgcgtactggctggaacgagcaggacattgtttcacgcgtgcaggcgtatatcaccacgcaaggttcgcgcggagccctggtacatacaccggagaagacctacgatattccgccggcacacgaacgtcgtgtcgttgatccaactggttgcggcgacgcgtttcgcgccggcctgatctatggtattcagcataattatgattggttgaccattggccgcatgggaaacttaatgggtgcgctgaaagtggaacaccctggcacgcaaaatcagcgtttcgattttgccctgttcaacgaccagttcaaacaagattttggctactcgctc

SEQ ID NO: 390 - protein, 321 aa, synthetic construct
  REGION 1..321: note = Variant of adenosine kinase
MHHHHHHGGSGMSALICGSLAYDTIMVFPDQFKNHILPDRVHRLNVSFLVPRMRREFGGCAGNIAYNLHLLGGAPIVMGTVGQDFQPYREHFETLGIDLSRVKIIDDLSTPQAFITTDHDHNQITAFHPGAMMRSYENHVRDVPGVTLGLVGPDGREGMIQNAEEFAAGDIPFIFDPGQALPLFNGPELREFIEQADYVVVNDYESNLLQTRTGWNEQDIVSRVQAYITTQGSRGALVHTPEKTYDIPPAHERRVVDPTGCGDAFRAGLIYGIQHNYDWLTIGRMGNLMGALKVEHPGTQNQRFDFALFNDQFKQDFGYSL

SEQ ID NO: 391 - DNA, 963 bp, synthetic construct
  misc_feature 1..963: note = Variant of adenosine kinase
  source 1..963: mol_type = other DNA
atgcaccatcatcaccatcacgggggctccggcatgagtgcactgatttgcggttctttagcgtatgataccatcatggtgtttccggaccagttcaagaaccatattctgcccgatcgtgttcaccgcctcaatgtcagctttcttgtaccacgcatgcgtcgtgaatttggaggctgtgccggcaacattgcgtacaatctgcatctgttgggtggtgctccgatcgtaatgggtacggtgggccaagatttccagccgtatcgcgagcacttcgaaactctgggcattgacttatcccgcgtcaagatcatcgatgatctgagtacaccgcaggccttcattaccaccgaccatgatcataaccagattacggcgtttcatccaggcgcaatgatgcgttcgtacgaaaatcacgttcgtgatgtgccgggtgttaccttgggcctcgtaggtcctgatggacgcgagggcatgatccaaaatgccgaagaatttgctgctggtggcattccgttcatttttgacccaggtcaggcactgccgctgttcaacggccccgaactgcgcgagtttatcgaacaggcggactatgtggtggtcaacgattacgaaagcaatcttcttcaagagcgtactggctggaacgagcaggacattgtttcacgcgtgcaggcgtatatcaccacgcaaggttcgaaaggagccctggtacatacaccggagaagacctacgatattccgccggcacacgaacgtcgtgtcgttgatccaactggttgcggcgacgcgtttcgcgccggcctgatctatggtattcagcataattatgattggttgaccattggccgcatgggaaacttaatgggtgcgctgaaagtggaacaccctggcacgcaaaatcagcgtttcgattttgccgaattcaacgaccagttcaaacaagattttggctacgcgctc

SEQ ID NO: 392 - protein, 321 aa, synthetic construct
  REGION 1..321: note = Variant of adenosine kinase
MHHHHHHGGSGMSALICGSLAYDTIMVFPDQFKNHILPDRVHRLNVSFLVPRMRREFGGCAGNIAYNLHLLGGAPIVMGTVGQDFQPYREHFETLGIDLSRVKIIDDLSTPQAFITTDHDHNQITAFHPGAMMRSYENHVRDVPGVTLGLVGPDGREGMIQNAEEFAAGGIPFIFDPGQALPLFNGPELREFIEQADYVVVNDYESNLLQERTGWNEQDIVSRVQAYITTQGSKGALVHTPEKTYDIPPAHERRVVDPTGCGDAFRAGLIYGIQHNYDWLTIGRMGNLMGALKVEHPGTQNQRFDFAEFNDQFKQDFGYAL

SEQ ID NO: 393 - DNA, 963 bp, synthetic construct
  misc_feature 1..963: note = Variant of adenosine kinase
  source 1..963: mol_type = other DNA
atgcaccatcatcaccatcacgggggctccggcatgagtgcactgatttgcggttctttagcgtatgataccatcatggtgtttccggaccagttcaagaaccatattctgcccgatcgtgttcaccgcctcaatgtcagctttcttgtaccacgcctgcgtcgtgaatttggaggctgtgccggcaacattgcgtacaatctgcatctgttgggtggtgctccgatcccaatgggtacggtgggccaagatttcggtccgtatcgcgagcacttcgaaactctgggcattgacttatcccgcgtcaagatcatcgatgatctgagtacagctcaggccttcattaccaccgaccatgatcataaccagattacggcgtttcatccaggcgcaatgatgcgttcgtacgaaaatcacgttcgtgatgtgccgggtgttaccttgggcctcgtaggtcctgatggacgcgagggcatgatccaaaatgccgaagaatttgctgctggtgatattccgttcatttttgacccaggtcaggcactgccgctgttcaacggccccgaactgcgcgagtttatcgaacaggcggactatgtggtggtcaacgattacgaaagcaatcttcttcaagagcgtactggctggaacgagcaggacattgtttcacgcgtgcaggcgtatatcaccacgcaaggttcgaaaggagccctggtacatacaccggagaagacctacgatattccgccggcacacgaacgtcgtgtcgttgatccaactggttgcggcgacgcgtttcgcgccggcctgatctatggtattcagcataattatgattggttgaccattggccgcatgggaaacttaatgggtgcgctgaaagtggaacaccctggcacgcaaaatcagcgtttcgattttgccgaattcaacgaccagttcaaacaagattttggctacgcgctc

SEQ ID NO: 394 - protein, 321 aa, synthetic construct
  REGION 1..321: note = Variant of adenosine kinase
MHHHHHHGGSGMSALICGSLAYDTIMVFPDQFKNHILPDRVHRLNVSFLVPRLRREFGGCAGNIAYNLHLLGGAPIPMGTVGQDFGPYREHFETLGIDLSRVKIIDDLSTAQAFITTDHDHNQITAFHPGAMMRSYENHVRDVPGVTLGLVGPDGREGMIQNAEEFAAGDIPFIFDPGQALPLFNGPELREFIEQADYVVVNDYESNLLQERTGWNEQDIVSRVQAYITTQGSKGALVHTPEKTYDIPPAHERRVVDPTGCGDAFRAGLIYGIQHNYDWLTIGRMGNLMGALKVEHPGTQNQRFDFAEFNDQFKQDFGYAL

SEQ ID NO: 395 - DNA, 963 bp, synthetic construct
  misc_feature 1..963: note = Variant of adenosine kinase
  source 1..963: mol_type = other DNA
atgcaccatcatcaccatcacgggggctccggcatgagtgcactgatttgcggttctttagcgtatgataccatcatggtgtttccggaccagttcaagaaccatattctgcccgatcgtgttcaccgcctcaatgtcagctttcttgtaccacgcatgcgtcgtgaatttggaggctgtgccggcaacattgcgtacaatctgcatctgttgggtggtgctccgatcgtaatggctacggtgggccaagatttcggtccgtatcgcgagcacttcgaaactctgggcattgacttatcccgcgtcaagatcatcgatgatctgagtacagctcaggccttcattaccaccgaccatgatcataaccagattacggcgtttcatccaggcgcaatgatgcgttcgtacgaaaatcacgttcgtgatgtgccgggtgttaccttgggcctcgtaggtcctgatggacgcgagggcatgatccaaaatgccgaagaatttgctgctggtggcattccgttcatttttgacccaggtcaggcactgccgctgttcaacggccccgaactgcgcgagtttatcgaacaggcggactatgtggtggtcaacgattacgaaagcaatcttcttcaagagcgtactggctggaacgagcaggacattgtttcacgcgtgcaggcgtatatcaccacgcaaggttcgaaaggagccctggtacatacaccggagaagacctacgatattccgccggcacacgaacgtcgtgtcgttgatccaactggttgcggcgacgcgtttcgcgccggcctgatctatggtattcagcataattatgattggttgaccattggccgcatgggaaacttaatgggtgcgctgaaagtggaacaccctggcacgcaaaatcagcgtttcgattttgccgaattcaacgaccagttcaaacaagattttggctacgcgctc

SEQ ID NO: 396 - protein, 321 aa, synthetic construct
  REGION 1..321: note = Variant of adenosine kinase
MHHHHHHGGSGMSALICGSLAYDTIMVFPDQFKNHILPDRVHRLNVSFLVPRMRREFGGCAGNIAYNLHLLGGAPIVMATVGQDFGPYREHFETLGIDLSRVKIIDDLSTAQAFITTDHDHNQITAFHPGAMMRSYENHVRDVPGVTLGLVGPDGREGMIQNAEEFAAGGIPFIFDPGQALPLFNGPELREFIEQADYVVVNDYESNLLQERTGWNEQDIVSRVQAYITTQGSKGALVHTPEKTYDIPPAHERRVVDPTGCGDAFRAGLIYGIQHNYDWLTIGRMGNLMGALKVEHPGTQNQRFDFAEFNDQFKQDFGYAL

SEQ ID NO: 397 - DNA, 963 bp, synthetic construct
  misc_feature 1..963: note = Variant of adenosine kinase
  source 1..963: mol_type = other DNA
atgcaccatcatcaccatcacgggggctccggcatgagtgcactgatttgcggttctttagcgtatgataccatcatggtgtttccggaccagttcaagaaccatattctgcccgatcgtgttcaccgcctcaatgtcagctttcttgtaccacgcctgcgtcgtgaatttggaggctgtgccggcaacattgcgtacaatctgcatctgttgggtggtgctccgatcgtaatgggtacggtgggccaagatttcgggccgtatcgcgagcacttcgaaactctgggcattgacttatcccgcgtcaagatcatcgatgatctgagtacagctcaggccttcattaccaccgaccatgatcataaccagattacggcgtttcatccaggcgcaatgatgcgttcgtacgaaaatcacgttcgtgatgtgccgggtgttaccttgggcctcgtaggtcctgatggacgcgagggcatgatccaaaatgccgaagaatttgctgctgctggtattccgttcatttttgacccaggtcaggcactgccgctgttcaacggccccgaactgcgcgagtttatcgaacaggcggactatgtggtggtcaacgattacgaaagcaatcttcttcaagagcgtactggctggaacgagcaggacattgtttcacgcgtgcaggcgtatatcaccacgcaaggttcgaaaggagtcctggtacatacaccggagaagacctacgatattcctccggcacacgaacgtcgtgtcgttgatccaactggttgcggcgacgcgtttcgcgccggcctgatctatggtattcagcataattatgattggttgaccattggccgcatgggaaacttaatgggtgcgctgaaagtggaacaccctggcacgcaaaatcagcgtttcgattttgccgaattcaacgaccagttcaaacaagattttggctacgcgctc

SEQ ID NO: 398 - protein, 321 aa, synthetic construct
  REGION 1..321: note = Variant of adenosine kinase
MHHHHHHGGSGMSALICGSLAYDTIMVFPDQFKNHILPDRVHRLNVSFLVPRLRREFGGCAGNIAYNLHLLGGAPIVMGTVGQDFGPYREHFETLGIDLSRVKIIDDLSTAQAFITTDHDHNQITAFHPGAMMRSYENHVRDVPGVTLGLVGPDGREGMIQNAEEFAAAGIPFIFDPGQALPLFNGPELREFIEQADYVVVNDYESNLLQERTGWNEQDIVSRVQAYITTQGSKGVLVHTPEKTYDIPPAHERRVVDPTGCGDAFRAGLIYGIQHNYDWLTIGRMGNLMGALKVEHPGTQNQRFDFAEFNDQFKQDFGYAL

SEQ ID NO: 399 - DNA, 963 bp, synthetic construct
  misc_feature 1..963: note = Variant of adenosine kinase
  source 1..963: mol_type = other DNA
atgcaccatcatcaccatcacgggggctccggcatgagtgcactgatttgcggttctttagcgtatgataccatcatggtgtttccggaccagttcaagaaccatattctgcccgatcgtgttcaccgcctcaatgtcagctttcttgtaccacgcatgcgtcgtgaatttggaggctgtgccggcaacattgcgtacaatctgcatctgttgggtggtgctccgatcgtaatgggtacggtgggccaagatttcggtccgtatcgcgagcacttcgaaactctgggcattgacttatcccgcgtcaagatcatcgatgatctgagtacaccgcaggccttcattaccaccgaccatgatcataaccagattacggcgtttcatccaggcgcaatgatgcgttcgtacgaaaatcacgttcgtgatgtgccgggtgttaccttgggcctcgtaggtcctgatggacgcgagggcatgatccaaaatgccgaagaatttgctgctggtggcattccgttcatttttgacccaggtcaggcactgccgctgttcaacggccccgaactgcgcgagtttatcgaacaggcggactatgtggtggtcaacgattacgaaagcaatcttcttcaaacgcgtactggctggaacgagcaggacattgtttcacgcgtgcaggcgtatatcaccacgcaaggttcgcgcggagccctggtacatacaccggagaagacctacgatattccgccggcacacgaacgtcgtgtcgttgatccaactggttgcggcgacgcgtttcgcgccggcctgatctatggtattcagcataattatgattggttgaccattggccgcatgggaaacttaatgggtgcgctgaaagtggaacaccctggcacgcaaaatcagcgtttcgattttgccgaattcaacgaccagttcaaacaagattttggctacgcgctc

SEQ ID NO: 400 - protein, 321 aa, synthetic construct
  REGION 1..321: note = Variant of adenosine kinase
MHHHHHHGGSGMSALICGSLAYDTIMVFPDQFKNHILPDRVHRLNVSFLVPRMRREFGGCAGNIAYNLHLLGGAPIVMGTVGQDFGPYREHFETLGIDLSRVKIIDDLSTPQAFITTDHDHNQITAFHPGAMMRSYENHVRDVPGVTLGLVGPDGREGMIQNAEEFAAGGIPFIFDPGQALPLFNGPELREFIEQADYVVVNDYESNLLQTRTGWNEQDIVSRVQAYITTQGSRGALVHTPEKTYDIPPAHERRVVDPTGCGDAFRAGLIYGIQHNYDWLTIGRMGNLMGALKVEHPGTQNQRFDFAEFNDQFKQDFGYAL

SEQ ID NO: 401 - DNA, 963 bp, synthetic construct
  misc_feature 1..963: note = Variant of adenosine kinase
  source 1..963: mol_type = other DNA
atgcaccatcatcaccatcacgggggctccggcatgagtgcactgatttgcggttctttagcgtatgataccatcatggtgtttccggaccagttcaagaaccatattctgcccgatcgtgttcaccgcctcaatgtcagctttcttgtaccacgcatgcgtcgtgaatttggaggctgtgccggcaacattgcgtacaatctgcatctgttgggtggtgctccgatcccaatgggtacggtgggccaagatttcgggccgtatcgcgagcacttcgaaactctgggcattgacttatcccgcgtcaagatcatcgatgatctgagtacacctcaggccttcattaccaccgaccatgatcataaccagattacggcgtttcatccaggcgcaatgatgcgttcgtacgaaaatcacgttcgtgatgtgccgggtgttaccttgggcctcgtaggtcctgatggacgcgagggcatgatccaaaatgccgaagaatttgctgctggtggcattccgttcatttttgacccaggtcaggcactgccgctgttcaacggccccgaactgcgcgagtttatcgaacaggcggactatgtggtggtcaacgattacgaaagcaatcttcttcaaacgcgtactggctggaacgagcaggacattgtttcacgcgtgcaggcgtatatcaccacgcaaggttcgaaaggagccctggtacatacaccggagaagacctacgatattccgccggcacacgaacgtcgtgtcgttgatccaactggttgcggcgacgcgtttcgcgccggcctgatctatggtattcagcataattatgattggttgaccattggccgcatgggaaacttaatgggtgcgctgaaagtggaacaccctggcacgcaaaatcagcgtttcgattttgccgaattcaacgaccagttcaaacaagattttggctacgcgctc

SEQ ID NO: 402 - protein, 321 aa, synthetic construct
  REGION 1..321: note = Variant of adenosine kinase
MHHHHHHGGSGMSALICGSLAYDTIMVFPDQFKNHILPDRVHRLNVSFLVPRMRREFGGCAGNIAYNLHLLGGAPIPMGTVGQDFGPYREHFETLGIDLSRVKIIDDLSTPQAFITTDHDHNQITAFHPGAMMRSYENHVRDVPGVTLGLVGPDGREGMIQNAEEFAAGGIPFIFDPGQALPLFNGPELREFIEQADYVVVNDYESNLLQTRTGWNEQDIVSRVQAYITTQGSKGALVHTPEKTYDIPPAHERRVVDPTGCGDAFRAGLIYGIQHNYDWLTIGRMGNLMGALKVEHPGTQNQRFDFAEFNDQFKQDFGYAL

SEQ ID NO: 403 - DNA, 963 bp, synthetic construct
  misc_feature 1..963: note = Variant of adenosine kinase
  source 1..963: mol_type = other DNA
atgcaccatcatcaccatcacgggggctccggcatgagtgcactgatttgcggttctttagcgtatgataccatcatggtgtttccggaccagttcaagaaccatattctgcccgatcgtgttcaccgcctcaatgtcagctttcttgtaccacgcctgcgtcgtgaatttggaggctgtgccggcaacattgcgtacaatctgcatctgttgggtggtgctccgatcgtaatgggtacggtgggccaagatttcggtccgtatcgcgagcacttcgaaactctgggcattgacttatcccgcgtcaagatcatcgatgatctgagtacaccgcaggccttcattaccaccgaccatgatcataaccagattacggcgtttcatccaggcgcaatgatgcgttcgtacgaaaatcacgttcgtgatgtgccgggtgttaccttgggcctcgtaggtcctgatggacgcgagggcatgatccaaaatgccgaagaatttgctgctggtggcattccgttcatttttgacccaggtcaggcactgccgctgttcaacggccccgaactgcgcgagtttatcgaacaggcggactatgtggtggtcaacgattacgaaagcaatcttcttcaagaacgtactggctggaacgagcaggacattgtttcacgcgtgcaggcgtatatcaccacgcaaggttcgaaaggagccctggtacatacaccggagaagacctacgatattccgccggcacacgaacgtcgtgtcgttgatccaactggttgcggcgacgcgtttcgcgccggcctgatctatggtattcagcataattatgattggttgaccattggccgcatgggaaacttaatgggtgcgctgaaagtggaacaccctggcacgcaaaatcagcgtttcgattttgccgaattcaacgaccagttcaaacaagattttggctacgcgctc

SEQ ID NO: 404 - protein, 321 aa, synthetic construct
  REGION 1..321: note = Variant of adenosine kinase
MHHHHHHGGSGMSALICGSLAYDTIMVFPDQFKNHILPDRVHRLNVSFLVPRLRREFGGCAGNIAYNLHLLGGAPIVMGTVGQDFGPYREHFETLGIDLSRVKIIDDLSTPQAFITTDHDHNQITAFHPGAMMRSYENHVRDVPGVTLGLVGPDGREGMIQNAEEFAAGGIPFIFDPGQALPLFNGPELREFIEQADYVVVNDYESNLLQERTGWNEQDIVSRVQAYITTQGSKGALVHTPEKTYDIPPAHERRVVDPTGCGDAFRAGLIYGIQHNYDWLTIGRMGNLMGALKVEHPGTQNQRFDFAEFNDQFKQDFGYAL

SEQ ID NO: 405 - DNA, 963 bp, synthetic construct
  misc_feature 1..963: note = Variant of adenosine kinase
  source 1..963: mol_type = other DNA
atgcaccatcatcaccatcacgggggctccggcatgagtgcactgatttgcggttctttagcgtatgataccatcatggtgtttccggaccagttcaagaaccatattctgcccgatcgtgttcaccgcctcaatgtcagctttcttgtaccacgcatgcgtcgtgaatttggaggctgtgccggcaacattgcgtacaatctgcatctgttgggtggtgctccgatccctatgggaacggtgggccaagatttccagccgtatcgcgagcacttcgaaactctgggcattgacttatcccgcgtcaagatcatcgatgatctgagtacaccgcaggccttcattaccaccgaccatgatcataaccagattacggcgtttcatccaggcgcaatgatgcgttcgtacgaaaatcacgttcgtgatgtgccgggtgttaccttgggcctcgtaggtcctgatggacgcgagggcatgatccaaaatgccgaagaatttgctgctgctggtattccgttcatttttgacccaggtcaggcactgccgctgttcaacggccccgaactgcgcgagtttatcgaacaggcggactatgtggtggtcaacgattacgaaagcaatcttcttcaagagcgtactggctggaacgagcaggacattgtttcacgcgtgcaggcgtatatcaccacgcaaggttcgcgcggagccctggtacatacaccggagaagacctacgatattccgccggcacacgaacgtcgtgtcgttgatccaactggttgcggcgacgcgtttcgcgccggcctgatctatggtattcagcataattatgattggttgaccattggccgcatgggaaacttaatgggtgcgctgaaagtggaacaccctggcacgcaaaatcagcgtttcgattttgccgaattcaacgaccagttcaaacaagattttggctacgcgctc

SEQ ID NO: 406 - protein, 321 aa, synthetic construct
  REGION 1..321: note = Variant of adenosine kinase
MHHHHHHGGSGMSALICGSLAYDTIMVFPDQFKNHILPDRVHRLNVSFLVPRMRREFGGCAGNIAYNLHLLGGAPIPMGTVGQDFQPYREHFETLGIDLSRVKIIDDLSTPQAFITTDHDHNQITAFHPGAMMRSYENHVRDVPGVTLGLVGPDGREGMIQNAEEFAAAGIPFIFDPGQALPLFNGPELREFIEQADYVVVNDYESNLLQERTGWNEQDIVSRVQAYITTQGSRGALVHTPEKTYDIPPAHERRVVDPTGCGDAFRAGLIYGIQHNYDWLTIGRMGNLMGALKVEHPGTQNQRFDFAEFNDQFKQDFGYAL

SEQ ID NO: 407 - DNA, 963 bp, synthetic construct
  misc_feature 1..963: note = Variant of adenosine kinase
  source 1..963: mol_type = other DNA
atgcaccatcatcaccatcacgggggctccggcatgagtgcactgatttgcggttctttagcgtatgataccatcatggtgtttccggaccagttcaagaaccatattctgcccgatcgtgttcaccgcctcaatgtcagctttcttgtaccacgcctgcgtcgtgaatttggaggctgtgccggcaacattgcgtacaatctgcatctgttgggtggtgctccgatccctatgggaacggtgggccaagatttcgggccgtatcgcgagcacttcgaaactctgggcattgacttatcccgcgtcaagatcatcgatgatctgagtacacctcaggccttcattaccaccgaccatgatcataaccagattacggcgtttcatccaggcgcaatgatgcgttcgtacgaaaatcacgttcgtgatgtgccgggtgttaccttgggcctcgtaggtcctgatggacgcgagggcatgatccaaaatgccgaagaatttgctgctggtggtattccgttcatttttgacccaggtcaggcactgccgctgttcaacggccccgaactgcgcgagtttatcgaacaggcggactatgtggtggtcaacgattacgaaagcaatcttcttcaaacgcgtactggctggaacgagcaggacattgtttcacgcgtgcaggcgtatatcaccacgcaaggttcgcgcggagccctggtacatacaccggagaagacctacgatattcgtccggcacacgaacgtcgtgtcgttgatccaactggttgcggcgacgcgtttcgcgccggcctgatctatggtattcagcataattatgattggttgaccattggccgcatgggaaacttaatgggtgcgctgaaagtggaacaccctggcacgcaaaatcagcgtttcgattttgccgaattcaacgaccagttcaaacaagattttggctacgcgctc

SEQ ID NO: 408 - protein, 321 aa, synthetic construct
  REGION 1..321: note = Variant of adenosine kinase
MHHHHHHGGSGMSALICGSLAYDTIMVFPDQFKNHILPDRVHRLNVSFLVPRLRREFGGCAGNIAYNLHLLGGAPIPMGTVGQDFGPYREHFETLGIDLSRVKIIDDLSTPQAFITTDHDHNQITAFHPGAMMRSYENHVRDVPGVTLGLVGPDGREGMIQNAEEFAAGGIPFIFDPGQALPLFNGPELREFIEQADYVVVNDYESNLLQTRTGWNEQDIVSRVQAYITTQGSRGALVHTPEKTYDIRPAHERRVVDPTGCGDAFRAGLIYGIQHNYDWLTIGRMGNLMGALKVEHPGTQNQRFDFAEFNDQFKQDFGYAL

SEQ ID NO: 409 - DNA, 963 bp, synthetic construct
  misc_feature 1..963: note = Variant of adenosine kinase
  source 1..963: mol_type = other DNA
atgcaccatcatcaccatcacgggggctccggcatgagtgcactgatttgcggttctttagcgtatgataccatcatggtgtttccggaccagttcaagaaccatattctgcccgatcgtgttcaccgcctcaatgtcagctttcttgtaccacgcatgcgtcgtgaatttggaggctgtgccggcaacattgcgtacaatctgcatctgttgggtggtgctccgatcccaatgggtacggtgggccaagatttcggtccgtatcgcgagcacttcgaaactctgggcattgacttatcccgcgtcaagatcatcgatgatctgagtacagctcaggccttcattaccaccgaccatgatcataaccagattacggcgtttcatccaggcgcaatgatgcgttcgtacgaaaatcacgttcgtgatgtgccgggtgttaccttgggcctcgtaggtcctgatggacgcgagggcatgatccaaaatgccgaagaatttgctgctgctgatattccgttcatttttgacccaggtcaggcactgccgctgttcaacggccccgaactgcgcgagtttatcgaacaggcggactatgtggtggtcaacgattacgaaagcaatcttcttcaagagcgtactggctggaacgagcaggacattgtttcacgcgtgcaggcgtatatcaccacgcaaggttcgaaaggagtcctggtacatacaccggagaagacctacgatattcgtccggcacacgaacgtcgtgtcgttgatccaactggttgcggcgacgcgtttcgcgccggcctgatctatggtattcagcataattatgattggttgaccattggccgcatgggaaacttaatgggtgcgctgaaagtggaacaccctggcacgcaaaatcagcgtttcgattttgccgaattcaacgaccagttcaaacaagattttggctacgcgctc

SEQ ID NO: 410 - protein, 321 aa, synthetic construct
  REGION 1..321: note = Variant of adenosine kinase
MHHHHHHGGSGMSALICGSLAYDTIMVFPDQFKNHILPDRVHRLNVSFLVPRMRREFGGCAGNIAYNLHLLGGAPIPMGTVGQDFGPYREHFETLGIDLSRVKIIDDLSTAQAFITTDHDHNQITAFHPGAMMRSYENHVRDVPGVTLGLVGPDGREGMIQNAEEFAAADIPFIFDPGQALPLFNGPELREFIEQADYVVVNDYESNLLQERTGWNEQDIVSRVQAYITTQGSKGVLVHTPEKTYDIRPAHERRVVDPTGCGDAFRAGLIYGIQHNYDWLTIGRMGNLMGALKVEHPGTQNQRFDFAEFNDQFKQDFGYAL

SEQ ID NO: 411 - DNA, 963 bp, synthetic construct
  misc_feature 1..963: note = Variant of adenosine kinase
  source 1..963: mol_type = other DNA
atgcaccatcatcaccatcacgggggctccggcatgagtgcactgatttgcggttctttagcgtatgataccatcatggtgtttccggaccagttcaagaaccatattctgcccgatcgtgttcaccgcctcaatgtcagctttcttgtaccacgcatgcgtcgtgaatttggaggctgtgccggcaacattgcgtacaatctgcatctgttgggtggtgctccgatcgtaatggctacggtgggccaagatttcgggccgtatcgcgagcacttcgaaactctgggcattgacttatcccgcgtcaagatcatcgatgatctgagtacaccgcaggccttcattaccaccgaccatgatcataaccagattacggcgtttcatccaggcgcaatgatgcgttcgtacgaaaatcacgttcgtgatgtgccgggtgttaccttgggcctcgtaggtcctgatggacgcgagggcatgatccaaaatgccgaagaatttgctgctggtggcattccgttcatttttgacccaggtcaggcactgccgctgttcaacggccccgaactgcgcgagtttatcgaacaggcggactatgtggtggtcaacgattacgaaagcaatcttcttcaaacgcgtactggctggaacgagcaggacattgtttcacgcgtgcaggcgtatatcaccacgcaaggttcgaaaggagccctggtacatacaccggagaagacctacgatattcctccggcacacgaacgtcgtgtcgttgatccaactggttgcggcgacgcgtttcgcgccggcctgatctatggtattcagcataattatgattggttgaccattggccgcatgggaaacttaatgggtgcgctgaaagtggaacaccctggcacgcaaaatcagcgtttcgattttgccgaattcaacgaccagttcaaacaagattttggctacgcgctc

SEQ ID NO: 412 - protein, 321 aa, synthetic construct
  REGION 1..321: note = Variant of adenosine kinase
MHHHHHHGGSGMSALICGSLAYDTIMVFPDQFKNHILPDRVHRLNVSFLVPRMRREFGGCAGNIAYNLHLLGGAPIVMATVGQDFGPYREHFETLGIDLSRVKIIDDLSTPQAFITTDHDHNQITAFHPGAMMRSYENHVRDVPGVTLGLVGPDGREGMIQNAEEFAAGGIPFIFDPGQALPLFNGPELREFIEQADYVVVNDYESNLLQTRTGWNEQDIVSRVQAYITTQGSKGALVHTPEKTYDIPPAHERRVVDPTGCGDAFRAGLIYGIQHNYDWLTIGRMGNLMGALKVEHPGTQNQRFDFAEFNDQFKQDFGYAL

SEQ ID NO: 413 - DNA, 963 bp, synthetic construct
  misc_feature 1..963: note = Variant of adenosine kinase
  source 1..963: mol_type = other DNA
atgcaccatcatcaccatcacgggggctccggcatgagtgcactgatttgcggttctttagcgtatgataccatcatggtgtttccggaccagttcaagaaccatattctgcccgatcgtgttcaccgcctcaatgtcagctttcttgtaccacgcatgcgtcgtgaatttggaggctgtgccggcaacattgcgtacaatctgcatctgttgggtggtgctccgatcgtaatggctacggtgggccaagatttcggtccgtatcgcgagcacttcgaaactctgggcattgacttatcccgcgtcaagatcatcgatgatctgagtacacctcaggccttcattaccaccgaccatgatcataaccagattacggcgtttcatccaggcgcaatgatgcgttcgtacgaaaatcacgttcgtgatgtgccgggtgttaccttgggcctcgtaggtcctgatggacgcgagggcatgatccaaaatgccgaagaatttgctgctgctgatattccgttcatttttgacccaggtcaggcactgccgctgttcaacggccccgaactgcgcgagtttatcgaacaggcggactatgtggtggtcaacgattacgaaagcaatcttcttcaagagcgtactggctggaacgagcaggacattgtttcacgcgtgcaggcgtatatcaccacgcaaggttcgaaaggagccctggtacatacaccggagaagacctacgatattccgccggcacacgaacgtcgtgtcgttgatccaactggttgcggcgacgcgtttcgcgccggcctgatctatggtattcagcataattatgattggttgaccattggccgcatgggaaacttaatgggtgcgctgaaagtggaacaccctggcacgcaaaatcagcgtttcgattttgccgaattcaacgaccagttcaaacaagattttggctacgcgctc

SEQ ID NO: 414 - protein, 321 aa, synthetic construct
  REGION 1..321: note = Variant of adenosine kinase
MHHHHHHGGSGMSALICGSLAYDTIMVFPDQFKNHILPDRVHRLNVSFLVPRMRREFGGCAGNIAYNLHLLGGAPIVMATVGQDFGPYREHFETLGIDLSRVKIIDDLSTPQAFITTDHDHNQITAFHPGAMMRSYENHVRDVPGVTLGLVGPDGREGMIQNAEEFAAADIPFIFDPGQALPLFNGPELREFIEQADYVVVNDYESNLLQERTGWNEQDIVSRVQAYITTQGSKGALVHTPEKTYDIPPAHERRVVDPTGCGDAFRAGLIYGIQHNYDWLTIGRMGNLMGALKVEHPGTQNQRFDFAEFNDQFKQDFGYAL

SEQ ID NO: 415 - DNA, 963 bp, synthetic construct
  misc_feature 1..963: note = Variant of adenosine kinase
  source 1..963: mol_type = other DNA
atgcaccatcatcaccatcacgggggctccggcatgagtgcactgatttgcggttctttagcgtatgataccatcatggtgtttccggaccagttcaagaaccatattctgcccgatcgtgttcaccgcctcaatgtcagctttcttgtaccacgcatgcgtcgtgaatttggaggctgtgccggcaacattgcgtacaatctgcatctgttgggtggtgctccgatcgtaatggctacggtgggccaagatttccagccgtatcgcgagcacttcgaaactctgggcattgacttatcccgcgtcaagatcatcgatgatctgagtacaccgcaggccttcattaccaccgaccatgatcataaccagattacggcgtttcatccaggcgcaatgatgcgttcgtacgaaaatcacgttcgtgatgtgccgggtgttaccttgggcctcgtaggtcctgatggacgcgagggcatgatccaaaatgccgaagaatttgctgctgctggtattccgttcatttttgacccaggtcaggcactgccgctgttcaacggccccgaactgcgcgagtttatcgaacaggcggactatgtggtggtcaacgattacgaaagcaatcttcttcaagagcgtactggctggaacgagcaggacattgtttcacgcgtgcaggcgtatatcaccacgcaaggttcgaaaggagtcctggtacatacaccggagaagacctacgatattcctccggcacacgaacgtcgtgtcgttgatccaactggttgcggcgacgcgtttcgcgccggcctgatctatggtattcagcataattatgattggttgaccattggccgcatgggaaacttaatgggtgcgctgaaagtggaacaccctggcacgcaaaatcagcgtttcgattttgccgaattcaacgaccagttcaaacaagattttggctacgcgctc

SEQ ID NO: 416 - protein, 321 aa, synthetic construct
  REGION 1..321: note = Variant of adenosine kinase
MHHHHHHGGSGMSALICGSLAYDTIMVFPDQFKNHILPDRVHRLNVSFLVPRMRREFGGCAGNIAYNLHLLGGAPIVMATVGQDFQPYREHFETLGIDLSRVKIIDDLSTPQAFITTDHDHNQITAFHPGAMMRSYENHVRDVPGVTLGLVGPDGREGMIQNAEEFAAAGIPFIFDPGQALPLFNGPELREFIEQADYVVVNDYESNLLQERTGWNEQDIVSRVQAYITTQGSKGVLVHTPEKTYDIPPAHERRVVDPTGCGDAFRAGLIYGIQHNYDWLTIGRMGNLMGALKVEHPGTQNQRFDFAEFNDQFKQDFGYAL

SEQ ID NO: 417 - DNA, 963 bp, synthetic construct
  misc_feature 1..963: note = Variant of adenosine kinase
  source 1..963: mol_type = other DNA
atgcaccatcatcaccatcacgggggctccggcatgagtgcactgatttgcggttctttagcgtatgataccatcatggtgtttccggaccagttcaagaaccatattctgcccgatcgtgttcaccgcctcaatgtcagctttcttgtaccacgcatgcgtcgtgaatttggaggctgtgccggcaacattgcgtacaatctgcatctgttgggtggtgctccgatcccaatggctacggtgggccaagatttcggtccgtatcgcgagcacttcgaaactctgggcattgacttatcccgcgtcaagatcatcgatgatctgagtacaccgcaggccttcattaccaccgaccatgatcataaccagattacggcgtttcatccaggcgcaatgatgcgttcgtacgaaaatcacgttcgtgatgtgccgggtgttaccttgggcctcgtaggtcctgatggacgcgagggcatgatccaaaatgccgaagaatttgctgctggtggcattccgttcatttttgacccaggtcaggcactgccgctgttcaacggccccgaactgcgcgagtttatcgaacaggcggactatgtggtggtcaacgattacgaaagcaatcttcttcaaacgcgtactggctggaacgagcaggacattgtttcacgcgtgcaggcgtatatcaccacgcaaggttcgaaaggagccctggtacatacaccggagaagacctacgatattcgtccggcacacgaacgtcgtgtcgttgatccaactggttgcggcgacgcgtttcgcgccggcctgatctatggtattcagcataattatgattggttgaccattggccgcatgggaaacttaatgggtgcgctgaaagtggaacaccctggcacgcaaaatcagcgtttcgattttgccgaattcaacgaccagttcaaacaagattttggctacgcgctc

SEQ ID NO: 418 - protein, 321 aa, synthetic construct
  REGION 1..321: note = Variant of adenosine kinase
MHHHHHHGGSGMSALICGSLAYDTIMVFPDQFKNHILPDRVHRLNVSFLVPRMRREFGGCAGNIAYNLHLLGGAPIPMATVGQDFGPYREHFETLGIDLSRVKIIDDLSTPQAFITTDHDHNQITAFHPGAMMRSYENHVRDVPGVTLGLVGPDGREGMIQNAEEFAAGGIPFIFDPGQALPLFNGPELREFIEQADYVVVNDYESNLLQTRTGWNEQDIVSRVQAYITTQGSKGALVHTPEKTYDIRPAHERRVVDPTGCGDAFRAGLIYGIQHNYDWLTIGRMGNLMGALKVEHPGTQNQRFDFAEFNDQFKQDFGYAL

SEQ ID NO: 419 - DNA, 963 bp, synthetic construct
  misc_feature 1..963: note = Variant of adenosine kinase
  source 1..963: mol_type = other DNA
atgcaccatcatcaccatcacgggggctccggcatgagtgcactgatttgcggttctttagcgtatgataccatcatggtgtttccggaccagttcaagaaccatattctgcccgatcgtgttcaccgcctcaatgtcagctttcttgtaccacgcatgcgtcgtgaatttggaggctgtgccggcaacattgcgtacaatctgcatctgttgggtggtgctccgatcccaatggctacggtgggccaagatttcggtccgtatcgcgagcacttcgaaactctgggcattgacttatcccgcgtcaagatcatcgatgatctgagtacaccgcaggccttcattaccaccgaccatgatcataaccagattacggcgtttcatccaggcgcaatgatgcgttcgtacgaaaatcacgttcgtgatgtgccgggtgttaccttgggcctcgtaggtcctgatggacgcgagggcatgatccaaaatgccgaagaatttgctgctggtggcattccgttcatttttgacccaggtcaggcactgccgctgttcaacggccccgaactgcgcgagtttatcgaacaggcggactatgtggtggtcaacgattacgaaagcaatcttcttcaaacgcgtactggctggaacgagcaggacattgtttcacgcgtgcaggcgtatatcaccacgcaaggttcgaaaggagccctggtacatacaccggagaagacctacgatattccgccggcacacgaacgtcgtgtcgttgatccaactggttgcggcgacgcgtttcgcgccggcctgatctatggtattcagcataattatgattggttgaccattggccgcatgggaaacttaatgggtgcgctgaaagtggaacaccctggcacgcaaaatcagcgtttcgattttgccgaattcaacgaccagttcaaacaagattttggctacgcgctc

SEQ ID NO: 420 - protein, 321 aa, synthetic construct
  REGION 1..321: note = Variant of adenosine kinase
MHHHHHHGGSGMSALICGSLAYDTIMVFPDQFKNHILPDRVHRLNVSFLVPRMRREFGGCAGNIAYNLHLLGGAPIPMATVGQDFGPYREHFETLGIDLSRVKIIDDLSTPQAFITTDHDHNQITAFHPGAMMRSYENHVRDVPGVTLGLVGPDGREGMIQNAEEFAAGGIPFIFDPGQALPLFNGPELREFIEQADYVVVNDYESNLLQTRTGWNEQDIVSRVQAYITTQGSKGALVHTPEKTYDIPPAHERRVVDPTGCGDAFRAGLIYGIQHNYDWLTIGRMGNLMGALKVEHPGTQNQRFDFAEFNDQFKQDFGYAL

SEQ ID NO: 421 - DNA, 963 bp, synthetic construct
  misc_feature 1..963: note = Variant of adenosine kinase
  source 1..963: mol_type = other DNA
atgcaccatcatcaccatcacgggggctccggcatgagtgcactgatttgcggttctttagcgtatgataccatcatggtgtttccggaccagttcaagaaccatattctgcccgatcgtgttcaccgcctcaatgtcagctttcttgtaccacgcctgcgtcgtgaatttggaggctgtgccggcaacattgcgtacaatctgcatctgttgggtggtgctccgatcccaatgggtacggtgggccaagatttccagccgtatcgcgagcacttcgaaactctgggcattgacttatcccgcgtcaagatcatcgatgatctgagtacaccgcaggccttcattaccaccgaccatgatcataaccagattacggcgtttcatccaggcgcaatgatgcgttcgtacgaaaatcacgttcgtgatgtgccgggtgttaccttgggcctcgtaggtcctgatggacgcgagggcatgatccaaaatgccgaagaatttgctgctggtggtattccgttcatttttgacccaggtcaggcactgccgctgttcaacggccccgaactgcgcgagtttatcgaacaggcggactatgtggtggtcaacgattacgaaagcaatcttcttcaaacgcgtactggctggaacgagcaggacattgtttcacgcgtgcaggcgtatatcaccacgcaaggttcgcgcggagtcctggtacatacaccggagaagacctacgatattccgccggcacacgaacgtcgtgtcgttgatccaactggttgcggcgacgcgtttcgcgccggcctgatctatggtattcagcataattatgattggttgaccattggccgcatgggaaacttaatgggtgcgctgaaagtggaacaccctggcacgcaaaatcagcgtttcgattttgccgaattcaacgaccagttcaaacaagattttggctacgcgctc

SEQ ID NO: 422 - protein, 321 aa, synthetic construct
  REGION 1..321: note = Variant of adenosine kinase
MHHHHHHGGSGMSALICGSLAYDTIMVFPDQFKNHILPDRVHRLNVSFLVPRLRREFGGCAGNIAYNLHLLGGAPIPMGTVGQDFQPYREHFETLGIDLSRVKIIDDLSTPQAFITTDHDHNQITAFHPGAMMRSYENHVRDVPGVTLGLVGPDGREGMIQNAEEFAAGGIPFIFDPGQALPLFNGPELREFIEQADYVVVNDYESNLLQTRTGWNEQDIVSRVQAYITTQGSRGVLVHTPEKTYDIPPAHERRVVDPTGCGDAFRAGLIYGIQHNYDWLTIGRMGNLMGALKVEHPGTQNQRFDFAEFNDQFKQDFGYAL

SEQ ID NO: 423 - DNA, 963 bp, synthetic construct
  misc_feature 1..963: note = Variant of adenosine kinase
  source 1..963: mol_type = other DNA
atgcaccatcatcaccatcacgggggctccggcatgagtgcactgatttgcggttctttagcgtatgataccatcatggtgtttccggaccagttcaagaaccatattctgcccgatcgtgttcaccgcctcaatgtcagctttcttgtaccacgcatgcgtcgtgaatttggaggctgtgccggcaacattgcgtacaatctgcatctgttgggtggtgctccgatcccaatggctacggtgggccaagatttcgggccgtatcgcgagcacttcgaaactctgggcattgacttatcccgcgtcaagatcatcgatgatctgagtacacctcaggccttcattaccaccgaccatgatcataaccagattacggcgtttcatccaggcgcaatgatgcgttcgtacgaaaatcacgttcgtgatgtgccgggtgttaccttgggcctcgtaggtcctgatggacgcgagggcatgatccaaaatgccgaagaatttgctgctggtgatattccgttcatttttgacccaggtcaggcactgccgctgttcaacggccccgaactgcgcgagtttatcgaacaggcggactatgtggtggtcaacgattacgaaagcaatcttcttcaaacgcgtactggctggaacgagcaggacattgtttcacgcgtgcaggcgtatatcaccacgcaaggttcgaaaggagccctggtacatacaccggagaagacctacgatattccgccggcacacgaacgtcgtgtcgttgatccaactggttgcggcgacgcgtttcgcgccggcctgatctatggtattcagcataattatgattggttgaccattggccgcatgggaaacttaatgggtgcgctgaaagtggaacaccctggcacgcaaaatcagcgtttcgattttgccgaattcaacgaccagttcaaacaagattttggctacgcgctc

SEQ ID NO: 424 - protein, 321 aa, synthetic construct
  REGION 1..321: note = Variant of adenosine kinase
MHHHHHHGGSGMSALICGSLAYDTIMVFPDQFKNHILPDRVHRLNVSFLVPRMRREFGGCAGNIAYNLHLLGGAPIPMATVGQDFGPYREHFETLGIDLSRVKIIDDLSTPQAFITTDHDHNQITAFHPGAMMRSYENHVRDVPGVTLGLVGPDGREGMIQNAEEFAAGDIPFIFDPGQALPLFNGPELREFIEQADYVVVNDYESNLLQTRTGWNEQDIVSRVQAYITTQGSKGALVHTPEKTYDIPPAHERRVVDPTGCGDAFRAGLIYGIQHNYDWLTIGRMGNLMGALKVEHPGTQNQRFDFAEFNDQFKQDFGYAL

SEQ ID NO: 425 - DNA, 963 bp, synthetic construct
  misc_feature 1..963: note = Variant of adenosine kinase
  source 1..963: mol_type = other DNA
atgcaccatcatcaccatcacgggggctccggcatgagtgcactgatttgcggttctttagcgtatgataccatcatggtgtttccggaccagttcaagaaccatattctgcccgatcgtgttcaccgcctcaatgtcagctttcttgtaccacgcatgcgtcgtgaatttggaggctgtgccggcaacattgcgtacaatctgcatctgttgggtggtgctccgatccctatgggaacggtgggccaagatttcgggccgtatcgcgagcacttcgaaactctgggcattgacttatcccgcgtcaagatcatcgatgatctgagtacaccgcaggccttcattaccaccgaccatgatcataaccagattacggcgtttcatccaggcgcaatgatgcgttcgtacgaaaatcacgttcgtgatgtgccgggtgttaccttgggcctcgtaggtcctgatggacgcgagggcatgatccaaaatgccgaagaatttgctgctggtggtattccgttcatttttgacccaggtcaggcactgccgctgttcaacggccccgaactgcgcgagtttatcgaacaggcggactatgtggtggtcaacgattacgaaagcaatcttcttcaagaacgtactggctggaacgagcaggacattgtttcacgcgtgcaggcgtatatcaccacgcaaggttcgaaaggagccctggtacatacaccggagaagacctacgatattccgccggcacacgaacgtcgtgtcgttgatccaactggttgcggcgacgcgtttcgcgccggcctgatctatggtattcagcataattatgattggttgaccattggccgcatgggaaacttaatgggtgcgctgaaagtggaacaccctggcacgcaaaatcagcgtttcgattttgccctgttcaacgaccagttcaaacaagattttggctacgcgctc

SEQ ID NO: 426 - protein, 321 aa, synthetic construct
  REGION 1..321: note = Variant of adenosine kinase
MHHHHHHGGSGMSALICGSLAYDTIMVFPDQFKNHILPDRVHRLNVSFLVPRMRREFGGCAGNIAYNLHLLGGAPIPMGTVGQDFGPYREHFETLGIDLSRVKIIDDLSTPQAFITTDHDHNQITAFHPGAMMRSYENHVRDVPGVTLGLVGPDGREGMIQNAEEFAAGGIPFIFDPGQALPLFNGPELREFIEQADYVVVNDYESNLLQERTGWNEQDIVSRVQAYITTQGSKGALVHTPEKTYDIPPAHERRVVDPTGCGDAFRAGLIYGIQHNYDWLTIGRMGNLMGALKVEHPGTQNQRFDFALFNDQFKQDFGYAL

SEQ ID NO: 427 - DNA, 963 bp, synthetic construct
  misc_feature 1..963: note = Variant of adenosine kinase
  source 1..963: mol_type = other DNA
atgcaccatcatcaccatcacgggggctccggcatgagtgcactgatttgcggttctttagcgtatgataccatcatggtgtttccggaccagttcaagaaccatattctgcccgatcgtgttcaccgcctcaatgtcagctttcttgtaccacgcctgcgtcgtgaatttggaggctgtgccggcaacattgcgtacaatctgcatctgttgggtggtgctccgatccctatgggaacggtgggccaagatttcgggccgtatcgcgagcacttcgaaactctgggcattgacttatcccgcgtcaagatcatcgatgatctgagtacaccgcaggccttcattaccaccgaccatgatcataaccagattacggcgtttcatccaggcgcaatgatgcgttcgtacgaaaatcacgttcgtgatgtgccgggtgttaccttgggcctcgtaggtcctgatggacgcgagggcatgatccaaaatgccgaagaatttgctgctggtggcattccgttcatttttgacccaggtcaggcactgccgctgttcaacggccccgaactgcgcgagtttatcgaacaggcggactatgtggtggtcaacgattacgaaagcaatcttcttcaaacgcgtactggctggaacgagcaggacattgtttcacgcgtgcaggcgtatatcaccacgcaaggttcgaaaggagccctggtacatacaccggagaagacctacgatattccgccggcacacgaacgtcgtgtcgttgatccaactggttgcggcgacgcgtttcgcgccggcctgatctatggtattcagcataattatgattggttgaccattggccgcatgggaaacttaatgggtgcgctgaaagtggaacaccctggcacgcaaaatcagcgtttcgattttgccgaattcaacgaccagttcaaacaagattttggctacgcgctc

SEQ ID NO: 428 - protein, 321 aa, synthetic construct
  REGION 1..321: note = Variant of adenosine kinase
MHHHHHHGGSGMSALICGSLAYDTIMVFPDQFKNHILPDRVHRLNVSFLVPRLRREFGGCAGNIAYNLHLLGGAPIPMGTVGQDFGPYREHFETLGIDLSRVKIIDDLSTPQAFITTDHDHNQITAFHPGAMMRSYENHVRDVPGVTLGLVGPDGREGMIQNAEEFAAGGIPFIFDPGQALPLFNGPELREFIEQADYVVVNDYESNLLQTRTGWNEQDIVSRVQAYITTQGSKGALVHTPEKTYDIPPAHERRVVDPTGCGDAFRAGLIYGIQHNYDWLTIGRMGNLMGALKVEHPGTQNQRFDFAEFNDQFKQDFGYAL

SEQ ID NO: 429 - DNA, 963 bp, synthetic construct
  misc_feature 1..963: note = Variant of adenosine kinase
  source 1..963: mol_type = other DNA
atgcaccatcatcaccatcacgggggctccggcatgagtgcactgatttgcggttctttagcgtatgataccatcatggtgtttccggaccagttcaagaaccatattctgcccgatcgtgttcaccgcctcaatgtcagctttcttgtaccacgcatgcgtcgtgaatttggaggctgtgccggcaacattgcgtacaatctgcatctgttgggtggtgctccgatcccaatgggtacggtgggccaagatttcgggccgtatcgcgagcacttcgaaactctgggcattgacttatcccgcgtcaagatcatcgatgatctgagtacacctcaggccttcattaccaccgaccatgatcataaccagattacggcgtttcatccaggcgcaatgatgcgttcgtacgaaaatcacgttcgtgatgtgccgggtgttaccttgggcctcgtaggtcctgatggacgcgagggcatgatccaaaatgccgaagaatttgctgctgctggtattccgttcatttttgacccaggtcaggcactgccgctgttcaacggccccgaactgcgcgagtttatcgaacaggcggactatgtggtggtcaacgattacgaaagcaatcttcttcaagaacgtactggctggaacgagcaggacattgtttcacgcgtgcaggcgtatatcaccacgcaaggttcgcgcggagtcctggtacatacaccggagaagacctacgatattccgccggcacacgaacgtcgtgtcgttgatccaactggttgcggcgacgcgtttcgcgccggcctgatctatggtattcagcataattatgattggttgaccattggccgcatgggaaacttaatgggtgcgctgaaagtggaacaccctggcacgcaaaatcagcgtttcgattttgccgaattcaacgaccagttcaaacaagattttggctacgcgctc

SEQ ID NO: 430 - protein, 321 aa, synthetic construct
  REGION 1..321: note = Variant of adenosine kinase
MHHHHHHGGSGMSALICGSLAYDTIMVFPDQFKNHILPDRVHRLNVSFLVPRMRREFGGCAGNIAYNLHLLGGAPIPMGTVGQDFGPYREHFETLGIDLSRVKIIDDLSTPQAFITTDHDHNQITAFHPGAMMRSYENHVRDVPGVTLGLVGPDGREGMIQNAEEFAAAGIPFIFDPGQALPLFNGPELREFIEQADYVVVNDYESNLLQERTGWNEQDIVSRVQAYITTQGSRGVLVHTPEKTYDIPPAHERRVVDPTGCGDAFRAGLIYGIQHNYDWLTIGRMGNLMGALKVEHPGTQNQRFDFAEFNDQFKQDFGYAL

SEQ ID NO: 431 - DNA, 963 bp, synthetic construct
  misc_feature 1..963: note = Variant of adenosine kinase
  source 1..963: mol_type = other DNA
atgcaccatcatcaccatcacgggggctccggcatgagtgcactgatttgcggttctttagcgtatgataccatcatggtgtttccggaccagttcaagaaccatattctgcccgatcgtgttcaccgcctcaatgtcagctttcttgtaccacgcatgcgtcgtgaatttggaggctgtgccggcaacattgcgtacaatctgcatctgttgggtggtgctccgatcgtaatggctacggtgggccaagatttcggtccgtatcgcgagcacttcgaaactctgggcattgacttatcccgcgtcaagatcatcgatgatctgagtacaccgcaggccttcattaccaccgaccatgatcataaccagattacggcgtttcatccaggcgcaatgatgcgttcgtacgaaaatcacgttcgtgatgtgccgggtgttaccttgggcctcgtaggtcctgatggacgcgagggcatgatccaaaatgccgaagaatttgctgctgctggtattccgttcatttttgacccaggtcaggcactgccgctgttcaacggccccgaactgcgcgagtttatcgaacaggcggactatgtggtggtcaacgattacgaaagcaatcttcttcaagagcgtactggctggaacgagcaggacattgtttcacgcgtgcaggcgtatatcaccacgcaaggttcgcgcggagtcctggtacatacaccggagaagacctacgatattccgccggcacacgaacgtcgtgtcgttgatccaactggttgcggcgacgcgtttcgcgccggcctgatctatggtattcagcataattatgattggttgaccattggccgcatgggaaacttaatgggtgcgctgaaagtggaacaccctggcacgcaaaatcagcgtttcgattttgccgaattcaacgaccagttcaaacaagattttggctacgcgctc

SEQ ID NO: 432 - protein, 321 aa, synthetic construct
  REGION 1..321: note = Variant of adenosine kinase
MHHHHHHGGSGMSALICGSLAYDTIMVFPDQFKNHILPDRVHRLNVSFLVPRMRREFGGCAGNIAYNLHLLGGAPIVMATVGQDFGPYREHFETLGIDLSRVKIIDDLSTPQAFITTDHDHNQITAFHPGAMMRSYENHVRDVPGVTLGLVGPDGREGMIQNAEEFAAAGIPFIFDPGQALPLFNGPELREFIEQADYVVVNDYESNLLQERTGWNEQDIVSRVQAYITTQGSRGVLVHTPEKTYDIPPAHERRVVDPTGCGDAFRAGLIYGIQHNYDWLTIGRMGNLMGALKVEHPGTQNQRFDFAEFNDQFKQDFGYAL

SEQ ID NO: 433 - DNA, 963 bp, synthetic construct
  misc_feature 1..963: note = Variant of adenosine kinase
  source 1..963: mol_type = other DNA
atgcaccatcatcaccatcacgggggctccggcatgagtgcactgatttgcggttctttagcgtatgataccatcatggtgtttccggaccagttcaagaaccatattctgcccgatcgtgttcaccgcctcaatgtcagctttcttgtaccacgcctgcgtcgtgaatttggaggctgtgccggcaacattgcgtacaatctgcatctgttgggtggtgctccgatcgtaatggctacggtgggccaagatttcggtccgtatcgcgagcacttcgaaactctgggcattgacttatcccgcgtcaagatcatcgatgatctgagtacaccgcaggccttcattaccaccgaccatgatcataaccagattacggcgtttcatccaggcgcaatgatgcgttcgtacgaaaatcacgttcgtgatgtgccgggtgttaccttgggcctcgtaggtcctgatggacgcgagggcatgatccaaaatgccgaagaatttgctgctggtggcattccgttcatttttgacccaggtcaggcactgccgctgttcaacggccccgaactgcgcgagtttatcgaacaggcggactatgtggtggtcaacgattacgaaagcaatcttcttcaagagcgtactggctggaacgagcaggacattgtttcacgcgtgcaggcgtatatcaccacgcaaggttcgaaaggagccctggtacatacaccggagaagacctacgatattccgccggcacacgaacgtcgtgtcgttgatccaactggttgcggcgacgcgtttcgcgccggcctgatctatggtattcagcataattatgattggttgaccattggccgcatgggaaacttaatgggtgcgctgaaagtggaacaccctggcacgcaaaatcagcgtttcgattttgccgaattcaacgaccagttcaaacaagattttggctacgcgctc

SEQ ID NO: 434 - protein, 321 aa, synthetic construct
  REGION 1..321: note = Variant of adenosine kinase
MHHHHHHGGSGMSALICGSLAYDTIMVFPDQFKNHILPDRVHRLNVSFLVPRLRREFGGCAGNIAYNLHLLGGAPIVMATVGQDFGPYREHFETLGIDLSRVKIIDDLSTPQAFITTDHDHNQITAFHPGAMMRSYENHVRDVPGVTLGLVGPDGREGMIQNAEEFAAGGIPFIFDPGQALPLFNGPELREFIEQADYVVVNDYESNLLQERTGWNEQDIVSRVQAYITTQGSKGALVHTPEKTYDIPPAHERRVVDPTGCGDAFRAGLIYGIQHNYDWLTIGRMGNLMGALKVEHPGTQNQRFDFAEFNDQFKQDFGYAL

SEQ ID NO: 435 - DNA, 963 bp, synthetic construct
  misc_feature 1..963: note = Variant of adenosine kinase
  source 1..963: mol_type = other DNA
atgcaccatcatcaccatcacgggggctccggcatgagtgcactgatttgcggttctttagcgtatgataccatcatggtgtttccggaccagttcaagaaccatattctgcccgatcgtgttcaccgcctcaatgtcagctttcttgtaccacgcatgcgtcgtgaatttggaggctgtgccggcaacattgcgtacaatctgcatctgttgggtggtgctccgatcgtaatgggtacggtgggccaagatttcggtccgtatcgcgagcacttcgaaactctgggcattgacttatcccgcgtcaagatcatcgatgatctgagtacagctcaggccttcattaccaccgaccatgatcataaccagattacggcgtttcatccaggcgcaatgatgcgttcgtacgaaaatcacgttcgtgatgtgccgggtgttaccttgggcctcgtaggtcctgatggacgcgagggcatgatccaaaatgccgaagaatttgctgctggtggcattccgttcatttttgacccaggtcaggcactgccgctgttcaacggccccgaactgcgcgagtttatcgaacaggcggactatgtggtggtcaacgattacgaaagcaatcttcttcaagagcgtactggctggaacgagcaggacattgtttcacgcgtgcaggcgtatatcaccacgcaaggttcgaaaggagccctggtacatacaccggagaagacctacgatattccgccggcacacgaacgtcgtgtcgttgatccaactggttgcggcgacgcgtttcgcgccggcctgatctatggtattcagcataattatgattggttgaccattggccgcatgggaaacttaatgggtgcgctgaaagtggaacaccctggcacgcaaaatcagcgtttcgattttgccgaattcaacgaccagttcaaacaagattttggctacgcgctc

SEQ ID NO: 436 - protein, 321 aa, synthetic construct
  REGION 1..321: note = Variant of adenosine kinase
MHHHHHHGGSGMSALICGSLAYDTIMVFPDQFKNHILPDRVHRLNVSFLVPRMRREFGGCAGNIAYNLHLLGGAPIVMGTVGQDFGPYREHFETLGIDLSRVKIIDDLSTAQAFITTDHDHNQITAFHPGAMMRSYENHVRDVPGVTLGLVGPDGREGMIQNAEEFAAGGIPFIFDPGQALPLFNGPELREFIEQADYVVVNDYESNLLQERTGWNEQDIVSRVQAYITTQGSKGALVHTPEKTYDIPPAHERRVVDPTGCGDAFRAGLIYGIQHNYDWLTIGRMGNLMGALKVEHPGTQNQRFDFAEFNDQFKQDFGYAL

SEQ ID NO: 437 - DNA, 963 bp, synthetic construct
  misc_feature 1..963: note = Variant of adenosine kinase
  source 1..963: mol_type = other DNA
atgcaccatcatcaccatcacgggggctccggcatgagtgcactgatttgcggttctttagcgtatgataccatcatggtgtttccggaccagttcaagaaccatattctgcccgatcgtgttcaccgcctcaatgtcagctttcttgtaccacgcctgcgtcgtgaatttggaggctgtgccggcaacattgcgtacaatctgcatctgttgggtggtgctccgatcccaatgggtacggtgggccaagatttcggtccgtatcgcgagcacttcgaaactctgggcattgacttatcccgcgtcaagatcatcgatgatctgagtacaccgcaggccttcattaccaccgaccatgatcataaccagattacggcgtttcatccaggcgcaatgatgcgttcgtacgaaaatcacgttcgtgatgtgccgggtgttaccttgggcctcgtaggtcctgatggacgcgagggcatgatccaaaatgccgaagaatttgctgctggtggcattccgttcatttttgacccaggtcaggcactgccgctgttcaacggccccgaactgcgcgagtttatcgaacaggcggactatgtggtggtcaacgattacgaaagcaatcttcttcaagagcgtactggctggaacgagcaggacattgtttcacgcgtgcaggcgtatatcaccacgcaaggttcgcgcggagtcctggtacatacaccggagaagacctacgatattccgccggcacacgaacgtcgtgtcgttgatccaactggttgcggcgacgcgtttcgcgccggcctgatctatggtattcagcataattatgattggttgaccattggccgcatgggaaacttaatgggtgcgctgaaagtggaacaccctggcacgcaaaatcagcgtttcgattttgccgaattcaacgaccagttcaaacaagattttggctacgcgctc

SEQ ID NO: 438 - protein, 321 aa, synthetic construct
  REGION 1..321: note = Variant of adenosine kinase
MHHHHHHGGSGMSALICGSLAYDTIMVFPDQFKNHILPDRVHRLNVSFLVPRLRREFGGCAGNIAYNLHLLGGAPIPMGTVGQDFGPYREHFETLGIDLSRVKIIDDLSTPQAFITTDHDHNQITAFHPGAMMRSYENHVRDVPGVTLGLVGPDGREGMIQNAEEFAAGGIPFIFDPGQALPLFNGPELREFIEQADYVVVNDYESNLLQERTGWNEQDIVSRVQAYITTQGSRGVLVHTPEKTYDIPPAHERRVVDPTGCGDAFRAGLIYGIQHNYDWLTIGRMGNLMGALKVEHPGTQNQRFDFAEFNDQFKQDFGYAL

SEQ ID NO: 439 - DNA, 963 bp, synthetic construct
  misc_feature 1..963: note = Variant of adenosine kinase
  source 1..963: mol_type = other DNA
atgcaccatcatcaccatcacgggggctccggcatgagtgcactgatttgcggttctttagcgtatgataccatcatggtgtttccggaccagttcaagaaccatattctgcccgatcgtgttcaccgcctcaatgtcagctttcttgtaccacgcatgcgtcgtgaatttggaggctgtgccggcaacattgcgtacaatctgcatctgttgggtggtgctccgatcccaatgggtacggtgggccaagatttcgggccgtatcgcgagcacttcgaaactctgggcattgacttatcccgcgtcaagatcatcgatgatctgagtacacctcaggccttcattaccaccgaccatgatcataaccagattacggcgtttcatccaggcgcaatgatgcgttcgtacgaaaatcacgttcgtgatgtgccgggtgttaccttgggcctcgtaggtcctgatggacgcgagggcatgatccaaaatgccgaagaatttgctgctgctgatattccgttcatttttgacccaggtcaggcactgccgctgttcaacggccccgaactgcgcgagtttatcgaacaggcggactatgtggtggtcaacgattacgaaagcaatcttcttcaagagcgtactggctggaacgagcaggacattgtttcacgcgtgcaggcgtatatcaccacgcaaggttcgaaaggagccctggtacatacaccggagaagacctacgatattcctccggcacacgaacgtcgtgtcgttgatccaactggttgcggcgacgcgtttcgcgccggcctgatctatggtattcagcataattatgattggttgaccattggccgcatgggaaacttaatgggtgcgctgaaagtggaacaccctggcacgcaaaatcagcgtttcgattttgccgaattcaacgaccagttcaaacaagattttggctacgcgctc

SEQ ID NO: 440 - protein, 321 aa, synthetic construct
  REGION 1..321: note = Variant of adenosine kinase
MHHHHHHGGSGMSALICGSLAYDTIMVFPDQFKNHILPDRVHRLNVSFLVPRMRREFGGCAGNIAYNLHLLGGAPIPMGTVGQDFGPYREHFETLGIDLSRVKIIDDLSTPQAFITTDHDHNQITAFHPGAMMRSYENHVRDVPGVTLGLVGPDGREGMIQNAEEFAAADIPFIFDPGQALPLFNGPELREFIEQADYVVVNDYESNLLQERTGWNEQDIVSRVQAYITTQGSKGALVHTPEKTYDIPPAHERRVVDPTGCGDAFRAGLIYGIQHNYDWLTIGRMGNLMGALKVEHPGTQNQRFDFAEFNDQFKQDFGYAL

SEQ ID NO: 441 - DNA, 963 bp, synthetic construct
  misc_feature 1..963: note = Variant of adenosine kinase
  source 1..963: mol_type = other DNA
atgcaccatcatcaccatcacgggggctccggcatgagtgcactgatttgcggttctttagcgtatgataccatcatggtgtttccggaccagttcaagaaccatattctgcccgatcgtgttcaccgcctcaatgtcagctttcttgtaccacgcctgcgtcgtgaatttggaggctgtgccggcaacattgcgtacaatctgcatctgttgggtggtgctccgatcgtaatggctacggtgggccaagatttcggtccgtatcgcgagcacttcgaaactctgggcattgacttatcccgcgtcaagatcatcgatgatctgagtacaccgcaggccttcattaccaccgaccatgatcataaccagattacggcgtttcatccaggcgcaatgatgcgttcgtacgaaaatcacgttcgtgatgtgccgggtgttaccttgggcctcgtaggtcctgatggacgcgagggcatgatccaaaatgccgaagaatttgctgctgctggtattccgttcatttttgacccaggtcaggcactgccgctgttcaacggccccgaactgcgcgagtttatcgaacaggcggactatgtggtggtcaacgattacgaaagcaatcttcttcaagagcgtactggctggaacgagcaggacattgtttcacgcgtgcaggcgtatatcaccacgcaaggttcgaaaggagccctggtacatacaccggagaagacctacgatattccgccggcacacgaacgtcgtgtcgttgatccaactggttgcggcgacgcgtttcgcgccggcctgatctatggtattcagcataattatgattggttgaccattggccgcatgggaaacttaatgggtgcgctgaaagtggaacaccctggcacgcaaaatcagcgtttcgattttgccgaattcaacgaccagttcaaacaagattttggctacgcgctc

SEQ ID NO: 442 - protein, 321 aa, synthetic construct
  REGION 1..321: note = Variant of adenosine kinase
MHHHHHHGGSGMSALICGSLAYDTIMVFPDQFKNHILPDRVHRLNVSFLVPRLRREFGGCAGNIAYNLHLLGGAPIVMATVGQDFGPYREHFETLGIDLSRVKIIDDLSTPQAFITTDHDHNQITAFHPGAMMRSYENHVRDVPGVTLGLVGPDGREGMIQNAEEFAAAGIPFIFDPGQALPLFNGPELREFIEQADYVVVNDYESNLLQERTGWNEQDIVSRVQAYITTQGSKGALVHTPEKTYDIPPAHERRVVDPTGCGDAFRAGLIYGIQHNYDWLTIGRMGNLMGALKVEHPGTQNQRFDFAEFNDQFKQDFGYAL

SEQ ID NO: 443 - DNA, 963 bp, synthetic construct
  misc_feature 1..963: note = Variant of adenosine kinase
  source 1..963: mol_type = other DNA
atgcaccatcatcaccatcacgggggctccggcatgagtgcactgatttgcggttctttagcgtatgataccatcatggtgtttccggaccagttcaagaaccatattctgcccgatcgtgttcaccgcctcaatgtcagctttcttgtaccacgcctgcgtcgtgaatttggaggctgtgccggcaacattgcgtacaatctgcatctgttgggtggtgctccgatcccaatgggtacggtgggccaagatttccagccgtatcgcgagcacttcgaaactctgggcattgacttatcccgcgtcaagatcatcgatgatctgagtacacctcaggccttcattaccaccgaccatgatcataaccagattacggcgtttcatccaggcgcaatgatgcgttcgtacgaaaatcacgttcgtgatgtgccgggtgttaccttgggcctcgtaggtcctgatggacgcgagggcatgatccaaaatgccgaagaatttgctgctggtggcattccgttcatttttgacccaggtcaggcactgccgctgttcaacggccccgaactgcgcgagtttatcgaacaggcggactatgtggtggtcaacgattacgaaagcaatcttcttcaagaacgtactggctggaacgagcaggacattgtttcacgcgtgcaggcgtatatcaccacgcaaggttcgcgcggagtcctggtacatacaccggagaagacctacgatattcctccggcacacgaacgtcgtgtcgttgatccaactggttgcggcgacgcgtttcgcgccggcctgatctatggtattcagcataattatgattggttgaccattggccgcatgggaaacttaatgggtgcgctgaaagtggaacaccctggcacgcaaaatcagcgtttcgattttgccgaattcaacgaccagttcaaacaagattttggctacgcgctc

SEQ ID NO: 444 - protein, 321 aa, synthetic construct
  REGION 1..321: note = Variant of adenosine kinase
MHHHHHHGGSGMSALICGSLAYDTIMVFPDQFKNHILPDRVHRLNVSFLVPRLRREFGGCAGNIAYNLHLLGGAPIPMGTVGQDFQPYREHFETLGIDLSRVKIIDDLSTPQAFITTDHDHNQITAFHPGAMMRSYENHVRDVPGVTLGLVGPDGREGMIQNAEEFAAGGIPFIFDPGQALPLFNGPELREFIEQADYVVVNDYESNLLQERTGWNEQDIVSRVQAYITTQGSRGVLVHTPEKTYDIPPAHERRVVDPTGCGDAFRAGLIYGIQHNYDWLTIGRMGNLMGALKVEHPGTQNQRFDFAEFNDQFKQDFGYAL

SEQ ID NO: 445 - DNA, 963 bp, synthetic construct
  misc_feature 1..963: note = Variant of adenosine kinase
  source 1..963: mol_type = other DNA
atgcaccatcatcaccatcacgggggctccggcatgagtgcactgatttgcggttctttagcgtatgataccatcatggtgtttccggaccagttcaagaaccatattctgcccgatcgtgttcaccgcctcaatgtcagctttcttgtaccacgcctgcgtcgtgaatttggaggctgtgccggcaacattgcgtacaatctgcatctgttgggtggtgctccgatccctatgggaacggtgggccaagatttcgggccgtatcgcgagcacttcgaaactctgggcattgacttatcccgcgtcaagatcatcgatgatctgagtacaccgcaggccttcattaccaccgaccatgatcataaccagattacggcgtttcatccaggcgcaatgatgcgttcgtacgaaaatcacgttcgtgatgtgccgggtgttaccttgggcctcgtaggtcctgatggacgcgagggcatgatccaaaatgccgaagaatttgctgctgctggtattccgttcatttttgacccaggtcaggcactgccgctgttcaacggccccgaactgcgcgagtttatcgaacaggcggactatgtggtggtcaacgattacgaaagcaatcttcttcaagaacgtactggctggaacgagcaggacattgtttcacgcgtgcaggcgtatatcaccacgcaaggttcgcgcggagtcctggtacatacaccggagaagacctacgatattccgccggcacacgaacgtcgtgtcgttgatccaactggttgcggcgacgcgtttcgcgccggcctgatctatggtattcagcataattatgattggttgaccattggccgcatgggaaacttaatgggtgcgctgaaagtggaacaccctggcacgcaaaatcagcgtttcgattttgccgaattcaacgaccagttcaaacaagattttggctacgcgctc

SEQ ID NO: 446 - protein, 321 aa, synthetic construct
  REGION 1..321: note = Variant of adenosine kinase
MHHHHHHGGSGMSALICGSLAYDTIMVFPDQFKNHILPDRVHRLNVSFLVPRLRREFGGCAGNIAYNLHLLGGAPIPMGTVGQDFGPYREHFETLGIDLSRVKIIDDLSTPQAFITTDHDHNQITAFHPGAMMRSYENHVRDVPGVTLGLVGPDGREGMIQNAEEFAAAGIPFIFDPGQALPLFNGPELREFIEQADYVVVNDYESNLLQERTGWNEQDIVSRVQAYITTQGSRGVLVHTPEKTYDIPPAHERRVVDPTGCGDAFRAGLIYGIQHNYDWLTIGRMGNLMGALKVEHPGTQNQRFDFAEFNDQFKQDFGYAL

SEQ ID NO: 447 - DNA, 963 bp, synthetic construct
  misc_feature 1..963: note = Variant of adenosine kinase
  source 1..963: mol_type = other DNA
atgcaccatcatcaccatcacgggggctccggcatgagtgcactgatttgcggttctttagcgtatgataccatcatggtgtttccggaccagttcaagaaccatattctgcccgatcgtgttcaccgcctcaatgtcagctttcttgtaccacgcctgcgtcgtgaatttggaggctgtgccggcaacattgcgtacaatctgcatctgttgggtggtgctccgatccctatgggaacggtgggccaagatttcggtccgtatcgcgagcacttcgaaactctgggcattgacttatcccgcgtcaagatcatcgatgatctgagtacacctcaggccttcattaccaccgaccatgatcataaccagattacggcgtttcatccaggcgcaatgatgcgttcgtacgaaaatcacgttcgtgatgtgccgggtgttaccttgggcctcgtaggtcctgatggacgcgagggcatgatccaaaatgccgaagaatttgctgctggtggcattccgttcatttttgacccaggtcaggcactgccgctgttcaacggccccgaactgcgcgagtttatcgaacaggcggactatgtggtggtcaacgattacgaaagcaatcttcttcaagaacgtactggctggaacgagcaggacattgtttcacgcgtgcaggcgtatatcaccacgcaaggttcgcgcggagccctggtacatacaccggagaagacctacgatattccgccggcacacgaacgtcgtgtcgttgatccaactggttgcggcgacgcgtttcgcgccggcctgatctatggtattcagcataattatgattggttgaccattggccgcatgggaaacttaatgggtgcgctgaaagtggaacaccctggcacgcaaaatcagcgtttcgattttgccgaattcaacgaccagttcaaacaagattttggctacgcgctc

SEQ ID NO: 448 - protein, 321 aa, synthetic construct
  REGION 1..321: note = Variant of adenosine kinase
MHHHHHHGGSGMSALICGSLAYDTIMVFPDQFKNHILPDRVHRLNVSFLVPRLRREFGGCAGNIAYNLHLLGGAPIPMGTVGQDFGPYREHFETLGIDLSRVKIIDDLSTPQAFITTDHDHNQITAFHPGAMMRSYENHVRDVPGVTLGLVGPDGREGMIQNAEEFAAGGIPFIFDPGQALPLFNGPELREFIEQADYVVVNDYESNLLQERTGWNEQDIVSRVQAYITTQGSRGALVHTPEKTYDIPPAHERRVVDPTGCGDAFRAGLIYGIQHNYDWLTIGRMGNLMGALKVEHPGTQNQRFDFAEFNDQFKQDFGYAL

SEQ ID NO: 449 - DNA, 963 bp, synthetic construct
  misc_feature 1..963: note = Variant of adenosine kinase
  source 1..963: mol_type = other DNA
atgcaccatcatcaccatcacgggggctccggcatgagtgcactgatttgcggttctttagcgtatgataccatcatggtgtttccggaccagttcaagaaccatattctgcccgatcgtgttcaccgcctcaatgtcagctttcttgtaccacgcatgcgtcgtgaatttggaggctgtgccggcaacattgcgtacaatctgcatctgttgggtggtgctccgatcgtaatggctacggtgggccaagatttccagccgtatcgcgagcacttcgaaactctgggcattgacttatcccgcgtcaagatcatcgatgatctgagtacacctcaggccttcattaccaccgaccatgatcataaccagattacggcgtttcatccaggcgcaatgatgcgttcgtacgaaaatcacgttcgtgatgtgccgggtgttaccttgggcctcgtaggtcctgatggacgcgagggcatgatccaaaatgccgaagaatttgctgctggtgatattccgttcatttttgacccaggtcaggcactgccgctgttcaacggccccgaactgcgcgagtttatcgaacaggcggactatgtggtggtcaacgattacgaaagcaatcttcttcaaacgcgtactggctggaacgagcaggacattgtttcacgcgtgcaggcgtatatcaccacgcaaggttcgcgcggagtcctggtacatacaccggagaagacctacgatattcctccggcacacgaacgtcgtgtcgttgatccaactggttgcggcgacgcgtttcgcgccggcctgatctatggtattcagcataattatgattggttgaccattggccgcatgggaaacttaatgggtgcgctgaaagtggaacaccctggcacgcaaaatcagcgtttcgattttgccctgttcaacgaccagttcaaacaagattttggctactcgctc

SEQ ID NO: 450 - protein, 321 aa, synthetic construct
  REGION 1..321: note = Variant of adenosine kinase
MHHHHHHGGSGMSALICGSLAYDTIMVFPDQFKNHILPDRVHRLNVSFLVPRMRREFGGCAGNIAYNLHLLGGAPIVMATVGQDFQPYREHFETLGIDLSRVKIIDDLSTPQAFITTDHDHNQITAFHPGAMMRSYENHVRDVPGVTLGLVGPDGREGMIQNAEEFAAGDIPFIFDPGQALPLFNGPELREFIEQADYVVVNDYESNLLQTRTGWNEQDIVSRVQAYITTQGSRGVLVHTPEKTYDIPPAHERRVVDPTGCGDAFRAGLIYGIQHNYDWLTIGRMGNLMGALKVEHPGTQNQRFDFALFNDQFKQDFGYSL

SEQ ID NO: 451 - DNA, 963 bp, synthetic construct
  misc_feature 1..963: note = Variant of adenosine kinase
  source 1..963: mol_type = other DNA
atgcaccatcatcaccatcacgggggctccggcatgagtgcactgatttgcggttctttagcgtatgataccatcatggtgtttccggaccagttcaagaaccatattctgcccgatcgtgttcaccgcctcaatgtcagctttcttgtaccacgcctgcgtcgtgaatttggaggctgtgccggcaacattgcgtacaatctgcatctgttgggtggtgctccgatccctatgggaacggtgggccaagatttcggtccgtatcgcgagcacttcgaaactctgggcattgacttatcccgcgtcaagatcatcgatgatctgagtacaccgcaggccttcattaccaccgaccatgatcataaccagattacggcgtttcatccaggcgcaatgatgcgttcgtacgaaaatcacgttcgtgatgtgccgggtgttaccttgggcctcgtaggtcctgatggacgcgagggcatgatccaaaatgccgaagaatttgctgctggtgatattccgttcatttttgacccaggtcaggcactgccgctgttcaacggccccgaactgcgcgagtttatcgaacaggcggactatgtggtggtcaacgattacgaaagcaatcttcttcaagaacgtactggctggaacgagcaggacattgtttcacgcgtgcaggcgtatatcaccacgcaaggttcgaaaggagccctggtacatacaccggagaagacctacgatattccgccggcacacgaacgtcgtgtcgttgatccaactggttgcggcgacgcgtttcgcgccggcctgatctatggtattcagcataattatgattggttgaccattggccgcatgggaaacttaatgggtgcgctgaaagtggaacaccctggcacgcaaaatcagcgtttcgattttgccgaattcaacgaccagttcaaacaagattttggctacgcgctc

SEQ ID NO: 452 - protein, 321 aa, synthetic construct
  REGION 1..321: note = Variant of adenosine kinase
MHHHHHHGGSGMSALICGSLAYDTIMVFPDQFKNHILPDRVHRLNVSFLVPRLRREFGGCAGNIAYNLHLLGGAPIPMGTVGQDFGPYREHFETLGIDLSRVKIIDDLSTPQAFITTDHDHNQITAFHPGAMMRSYENHVRDVPGVTLGLVGPDGREGMIQNAEEFAAGDIPFIFDPGQALPLFNGPELREFIEQADYVVVNDYESNLLQERTGWNEQDIVSRVQAYITTQGSKGALVHTPEKTYDIPPAHERRVVDPTGCGDAFRAGLIYGIQHNYDWLTIGRMGNLMGALKVEHPGTQNQRFDFAEFNDQFKQDFGYAL

SEQ ID NO: 453 - DNA, 963 bp, synthetic construct
  misc_feature 1..963: note = Variant of adenosine kinase
  source 1..963: mol_type = other DNA
atgcaccatcatcaccatcacgggggctccggcatgagtgcactgatttgcggttctttagcgtatgataccatcatggtgtttccggaccagttcaagaaccatattctgcccgatcgtgttcaccgcctcaatgtcagctttcttgtaccacgcatgcgtcgtgaatttggaggctgtgccggcaacattgcgtacaatctgcatctgttgggtggtgctccgatcgtaatgggtacggtgggccaagatttcggtccgtatcgcgagcacttcgaaactctgggcattgacttatcccgcgtcaagatcatcgatgatctgagtacaccgcaggccttcattaccaccgaccatgatcataaccagattacggcgtttcatccaggcgcaatgatgcgttcgtacgaaaatcacgttcgtgatgtgccgggtgttaccttgggcctcgtaggtcctgatggacgcgagggcatgatccaaaatgccgaagaatttgctgctggtggtattccgttcatttttgacccaggtcaggcactgccgctgttcaacggccccgaactgcgcgagtttatcgaacaggcggactatgtggtggtcaacgattacgaaagcaatcttcttcaagaacgtactggctggaacgagcaggacattgtttcacgcgtgcaggcgtatatcaccacgcaaggttcgaaaggagccctggtacatacaccggagaagacctacgatattcgtccggcacacgaacgtcgtgtcgttgatccaactggttgcggcgacgcgtttcgcgccggcctgatctatggtattcagcataattatgattggttgaccattggccgcatgggaaacttaatgggtgcgctgaaagtggaacaccctggcacgcaaaatcagcgtttcgattttgccgaattcaacgaccagttcaaacaagattttggctacgcgctc

SEQ ID NO: 454 - protein, 321 aa, synthetic construct
  REGION 1..321: note = Variant of adenosine kinase
MHHHHHHGGSGMSALICGSLAYDTIMVFPDQFKNHILPDRVHRLNVSFLVPRMRREFGGCAGNIAYNLHLLGGAPIVMGTVGQDFGPYREHFETLGIDLSRVKIIDDLSTPQAFITTDHDHNQITAFHPGAMMRSYENHVRDVPGVTLGLVGPDGREGMIQNAEEFAAGGIPFIFDPGQALPLFNGPELREFIEQADYVVVNDYESNLLQERTGWNEQDIVSRVQAYITTQGSKGALVHTPEKTYDIRPAHERRVVDPTGCGDAFRAGLIYGIQHNYDWLTIGRMGNLMGALKVEHPGTQNQRFDFAEFNDQFKQDFGYAL

SEQ ID NO: 455 - DNA, 963 bp, synthetic construct
  misc_feature 1..963: note = Variant of adenosine kinase
  source 1..963: mol_type = other DNA
atgcaccatcatcaccatcacgggggctccggcatgagtgcactgatttgcggttctttagcgtatgataccatcatggtgtttccggaccagttcaagaaccatattctgcccgatcgtgttcaccgcctcaatgtcagctttcttgtaccacgcctgcgtcgtgaatttggaggctgtgccggcaacattgcgtacaatctgcatctgttgggtggtgctccgatccctatgggaacggtgggccaagatttccagccgtatcgcgagcacttcgaaactctgggcattgacttatcccgcgtcaagatcatcgatgatctgagtacaccgcaggccttcattaccaccgaccatgatcataaccagattacggcgtttcatccaggcgcaatgatgcgttcgtacgaaaatcacgttcgtgatgtgccgggtgttaccttgggcctcgtaggtcctgatggacgcgagggcatgatccaaaatgccgaagaatttgctgctggtggtattccgttcatttttgacccaggtcaggcactgccgctgttcaacggccccgaactgcgcgagtttatcgaacaggcggactatgtggtggtcaacgattacgaaagcaatcttcttcaagaacgtactggctggaacgagcaggacattgtttcacgcgtgcaggcgtatatcaccacgcaaggttcgaaaggagccctggtacatacaccggagaagacctacgatattccgccggcacacgaacgtcgtgtcgttgatccaactggttgcggcgacgcgtttcgcgccggcctgatctatggtattcagcataattatgattggttgaccattggccgcatgggaaacttaatgggtgcgctgaaagtggaacaccctggcacgcaaaatcagcgtttcgattttgccgaattcaacgaccagttcaaacaagattttggctacgcgctc

SEQ ID NO: 456 - protein, 321 aa, synthetic construct
  REGION 1..321: note = Variant of adenosine kinase
MHHHHHHGGSGMSALICGSLAYDTIMVFPDQFKNHILPDRVHRLNVSFLVPRLRREFGGCAGNIAYNLHLLGGAPIPMGTVGQDFQPYREHFETLGIDLSRVKIIDDLSTPQAFITTDHDHNQITAFHPGAMMRSYENHVRDVPGVTLGLVGPDGREGMIQNAEEFAAGGIPFIFDPGQALPLFNGPELREFIEQADYVVVNDYESNLLQERTGWNEQDIVSRVQAYITTQGSKGALVHTPEKTYDIPPAHERRVVDPTGCGDAFRAGLIYGIQHNYDWLTIGRMGNLMGALKVEHPGTQNQRFDFAEFNDQFKQDFGYAL

SEQ ID NO: 457 - DNA, 963 bp, synthetic construct
  misc_feature 1..963: note = Variant of adenosine kinase
  source 1..963: mol_type = other DNA
atgcaccatcatcaccatcacgggggctccggcatgagtgcactgatttgcggttctttagcgtatgataccatcatggtgtttccggaccagttcaagaaccatattctgcccgatcgtgttcaccgcctcaatgtcagctttcttgtaccacgcatgcgtcgtgaatttggaggctgtgccggcaacattgcgtacaatctgcatctgttgggtggtgctccgatccctatgggaacggtgggccaagatttcggtccgtatcgcgagcacttcgaaactctgggcattgacttatcccgcgtcaagatcatcgatgatctgagtacaccgcaggccttcattaccaccgaccatgatcataaccagattacggcgtttcatccaggcgcaatgatgcgttcgtacgaaaatcacgttcgtgatgtgccgggtgttaccttgggcctcgtaggtcctgatggacgcgagggcatgatccaaaatgccgaagaatttgctgctggtggcattccgttcatttttgacccaggtcaggcactgccgctgttcaacggccccgaactgcgcgagtttatcgaacaggcggactatgtggtggtcaacgattacgaaagcaatcttcttcaagaacgtactggctggaacgagcaggacattgtttcacgcgtgcaggcgtatatcaccacgcaaggttcgaaaggagccctggtacatacaccggagaagacctacgatattccgccggcacacacgcgtcgtgtcgttgatccaactggttgcggcgacgcgtttcgcgccggcctgatctatggtattcagcataattatgattggttgaccattggccgcatgggaaacttaatgggtgcgctgaaagtggaacaccctggcacgcaaaatcagcgtttcgattttgccgaattcaacgaccagttcaaacaagattttggctacgcgctc

SEQ ID NO: 458 - protein, 321 aa, synthetic construct
  REGION 1..321: note = Variant of adenosine kinase
MHHHHHHGGSGMSALICGSLAYDTIMVFPDQFKNHILPDRVHRLNVSFLVPRMRREFGGCAGNIAYNLHLLGGAPIPMGTVGQDFGPYREHFETLGIDLSRVKIIDDLSTPQAFITTDHDHNQITAFHPGAMMRSYENHVRDVPGVTLGLVGPDGREGMIQNAEEFAAGGIPFIFDPGQALPLFNGPELREFIEQADYVVVNDYESNLLQERTGWNEQDIVSRVQAYITTQGSKGALVHTPEKTYDIPPAHTRRVVDPTGCGDAFRAGLIYGIQHNYDWLTIGRMGNLMGALKVEHPGTQNQRFDFAEFNDQFKQDFGYAL

SEQ ID NO: 459 - DNA, 963 bp, synthetic construct
  misc_feature 1..963: note = Variant of adenosine kinase
  source 1..963: mol_type = other DNA
atgcaccatcatcaccatcacgggggctccggcatgagtgcactgatttgcggttctttagcgtatgataccatcatggtgtttccggaccagttcaagaaccatattctgcccgatcgtgttcaccgcctcaatgtcagctttcttgtaccacgcatgcgtcgtgaatttggaggctgtgccggcaacattgcgtacaatctgcatctgttgggtggtgctccgatccctatgggaacggtgggccaagatttcggtccgtatcgcgagcacttcgaaactctgggcattgacttatcccgcgtcaagatcatcgatgatctgagtacaccgcaggccttcattaccaccgaccatgatcataaccagattacggcgtttcatccaggcgcaatgatgcgttcgtacgaaaatcacgttcgtgatgtgccgggtgttaccttgggcctcgtaggtcctgatggacgcgagggcatgatccaaaatgccgaagaatttgctgctggtggcattccgttcatttttgacccaggtcagcagctgccgctgttcaacggccccgaactgcgcgagtttatcgaacaggcggactatgtggtggtcaacgattacgaaagcaatcttcttcaagaacgtactggctggaacgagcaggacattgtttcacgcgtgcaggcgtatatcaccacgcaaggttcgaaaggagccctggtacatacaccggagaagacctacgatattccgccggcacacgaacgtcgtgtcgttgatccaactggttgcggcgacgcgtttcgcgccggcctgatctatggtattcagcataattatgattggttgaccattggccgcatgggaaacttaatgggtgcgctgaaagtggaacaccctggcacgcaaaatcagcgtttcgattttgccgaattcaacgaccagttcaaacaagattttggctacgcgctc

SEQ ID NO: 460 - protein, 321 aa, synthetic construct
  REGION 1..321: note = Variant of adenosine kinase
MHHHHHHGGSGMSALICGSLAYDTIMVFPDQFKNHILPDRVHRLNVSFLVPRMRREFGGCAGNIAYNLHLLGGAPIPMGTVGQDFGPYREHFETLGIDLSRVKIIDDLSTPQAFITTDHDHNQITAFHPGAMMRSYENHVRDVPGVTLGLVGPDGREGMIQNAEEFAAGGIPFIFDPGQQLPLFNGPELREFIEQADYVVVNDYESNLLQERTGWNEQDIVSRVQAYITTQGSKGALVHTPEKTYDIPPAHERRVVDPTGCGDAFRAGLIYGIQHNYDWLTIGRMGNLMGALKVEHPGTQNQRFDFAEFNDQFKQDFGYAL

SEQ ID NO: 461 - DNA, 963 bp, synthetic construct
  misc_feature 1..963: note = Variant of adenosine kinase
  source 1..963: mol_type = other DNA
atgcaccatcatcaccatcacgggggctccggcatgagtgcactgatttgcggttctttagcgtatgataccatcatggtgtttccggaccagttcaagaaccatattctgcccgatcgtgttcaccgcctcaatgtcagctttcttgtaccacgcatgcgtcgtgaatttggaggctgtgccggcaacattgcgtacaatctgcatctgttgggtggtgctccgatccctatgggaacggtgggccaagatttcggtccgtatcgcgagcacttcgaaactctgggcattgacttatcccgcgtcaagatcatcgatgatctgagtacaccgcaggccttcattaccaccgaccatgatcataaccagattacggcgtttcatgggggcgcaatgatgcgttcgtacgaaaatcacgttcgtgatgtgccgggtgttaccttgggcctcgtaggtcctgatggacgcgagggcatgatccaaaatgccgaagaatttgctgctggtggcattccgttcatttttgacccaggtcaggcactgccgctgttcaacggccccgaactgcgcgagtttatcgaacaggcggactatgtggtggtcaacgattacgaaagcaatcttcttcaagaacgtactggctggaacgagcaggacattgtttcacgcgtgcaggcgtatatcaccacgcaaggttcgaaaggagccctggtacatacaccggagaagacctacgatattccgccggcacacgaacgtcgtgtcgttgatccaactggttgcggcgacgcgtttcgcgccggcctgatctatggtattcagcataattatgattggttgaccattggccgcatgggaaacttaatgggtgcgctgaaagtggaacaccctggcacgcaaaatcagcgtttcgattttgccgaattcaacgaccagttcaaacaagattttggctacgcgctc

SEQ ID NO: 462 - protein, 321 aa, synthetic construct
  REGION 1..321: note = Variant of adenosine kinase
MHHHHHHGGSGMSALICGSLAYDTIMVFPDQFKNHILPDRVHRLNVSFLVPRMRREFGGCAGNIAYNLHLLGGAPIPMGTVGQDFGPYREHFETLGIDLSRVKIIDDLSTPQAFITTDHDHNQITAFHGGAMMRSYENHVRDVPGVTLGLVGPDGREGMIQNAEEFAAGGIPFIFDPGQALPLFNGPELREFIEQADYVVVNDYESNLLQERTGWNEQDIVSRVQAYITTQGSKGALVHTPEKTYDIPPAHERRVVDPTGCGDAFRAGLIYGIQHNYDWLTIGRMGNLMGALKVEHPGTQNQRFDFAEFNDQFKQDFGYAL

SEQ ID NO: 463 - DNA, 963 bp, synthetic construct
  misc_feature 1..963: note = Variant of adenosine kinase
  source 1..963: mol_type = other DNA
atgcaccatcatcaccatcacgggggctccggcatgagtgcactgatttgcggttctttagcgtatgataccatcatggtgtttccggaccagttcaagaaccatattctgcccgatcgtgttcaccgcctcaatgtcagctttcttgtaccacgcatgcgtcgtgaatttggaggctgtgccggcaacattgcgtacaatctgcatctgttgggtggtgctccgatccctatgggaacggtgggccaagatttcggtccgtatcgcgagcacttcgaaactctgggcattgacttatcccgcgtcaagatcatcgatgatctgagtacaccgcaggccttcattaccaccgaccatgatatgaaccagattacggcgtttcatccaggcgcaatgatgcgttcgtacgaaaatcacgttcgtgatgtgccgggtgttaccttgggcctcgtaggtcctgatggacgcgagggcatgatccaaaatgccgaagaatttgctgctggtggcattccgttcatttttgacccaggtcaggcactgccgctgttcaacggccccgaactgcgcgagtttatcgaacaggcggactatgtggtggtcaacgattacgaaagcaatcttcttcaagaacgtactggctggaacgagcaggacattgtttcacgcgtgcaggcgtatatcaccacgcaaggttcgaaaggagccctggtacatacaccggagaagacctacgatattccgccggcacacgaacgtcgtgtcgttgatccaactggttgcggcgacgcgtttcgcgccggcctgatctatggtattcagcataattatgattggttgaccattggccgcatgggaaacttaatgggtgcgctgaaagtggaacaccctggcacgcaaaatcagcgtttcgattttgccgaattcaacgaccagttcaaacaagattttggctacgcgctc

SEQ ID NO: 464 - protein, 321 aa, synthetic construct
  REGION 1..321: note = Variant of adenosine kinase
MHHHHHHGGSGMSALICGSLAYDTIMVFPDQFKNHILPDRVHRLNVSFLVPRMRREFGGCAGNIAYNLHLLGGAPIPMGTVGQDFGPYREHFETLGIDLSRVKIIDDLSTPQAFITTDHDMNQITAFHPGAMMRSYENHVRDVPGVTLGLVGPDGREGMIQNAEEFAAGGIPFIFDPGQALPLFNGPELREFIEQADYVVVNDYESNLLQERTGWNEQDIVSRVQAYITTQGSKGALVHTPEKTYDIPPAHERRVVDPTGCGDAFRAGLIYGIQHNYDWLTIGRMGNLMGALKVEHPGTQNQRFDFAEFNDQFKQDFGYAL

SEQ ID NO: 465 - DNA, 963 bp, synthetic construct
  misc_feature 1..963: note = Variant of adenosine kinase
  source 1..963: mol_type = other DNA
atgcaccatcatcaccatcacgggggctccggcatgagtgcactgatttgcggttctttagcgtatgataccatcatggtgtttccggaccagttcaagaaccatattctgcccgatcgtgttcaccgcctcaatgtcagctttcttgtaccacgcatgcgtcgtgaatttggaggctgtgccggcaacattgcgtacaatctgcatctgttgggtggtgctccgatccctatgggaacggtgggccaagatttcggtccgtatcgcgagcacttcgaaactctgggcattgacttatcccgcgtcaagatcatcgatgatctgagtacaccgcaggccttcattaccaccgaccatgatcataaccagattacggcgtttcatccaggcgcaatgatgcgttcgtacgaaaatcacgttcgtgatgtgccgggtgttaccttgggcctcgtaggtcctgatggacgcgagggcatgatccaaaatgccgaagaatttgctgctggtggcattccgttcatttttgacccaggtcaggcactgccgctgttcaacggccccgaactgcgcgagtttatcgaacaggcggactatgtggtggtcaacgattacgaaagcaatcttcttcaagaacgtactggctggaacgagcaggacattgtttcacgcgtgcaggcgtatatcaccacgcaaggttcgaaaggagccctggtacatacaccggagaagacctacgatattccgccggcacacgaacgtcgtgcggttgatccaactggttgcggcgacgcgtttcgcgccggcctgatctatggtattcagcataattatgattggttgaccattggccgcatgggaaacttaatgggtgcgctgaaagtggaacaccctggcacgcaaaatcagcgtttcgattttgccgaattcaacgaccagttcaaacaagattttggctacgcgctc

SEQ ID NO: 466 - protein, 321 aa, synthetic construct
  REGION 1..321: note = Variant of adenosine kinase
MHHHHHHGGSGMSALICGSLAYDTIMVFPDQFKNHILPDRVHRLNVSFLVPRMRREFGGCAGNIAYNLHLLGGAPIPMGTVGQDFGPYREHFETLGIDLSRVKIIDDLSTPQAFITTDHDHNQITAFHPGAMMRSYENHVRDVPGVTLGLVGPDGREGMIQNAEEFAAGGIPFIFDPGQALPLFNGPELREFIEQADYVVVNDYESNLLQERTGWNEQDIVSRVQAYITTQGSKGALVHTPEKTYDIPPAHERRAVDPTGCGDAFRAGLIYGIQHNYDWLTIGRMGNLMGALKVEHPGTQNQRFDFAEFNDQFKQDFGYAL

SEQ ID NO: 467 - DNA, 963 bp, synthetic construct
  misc_feature 1..963: note = Variant of adenosine kinase
  source 1..963: mol_type = other DNA
atgcaccatcatcaccatcacgggggctccggcatgagtgcactgatttgcggttctttagcgtatgataccatcatggtgtttccggaccagttcaagaaccatattctgcccgatcgtgttcaccgcctcaatgtcagctttcttgtaccacgcatgcgtcgtgaatttggaggctgtgccggcaacattgcgtacaatctgcatctgttgggtggtgctccgatccctatgggaacggtgggccaagatttcggtccgtatcgcgagcacttcgaaactctgggcattgacttatcccgcgtcaagatcatcgatgatctgagtacaccgcaggccttcattaccaccgaccatgatcataaccagattacggcgtttcatccaggcgcaatgatgcgttcgtacgaaaatcacgttcgtgatgtgccgggtgttaccttgggcctcgtaggtcctgatggacgcgagggcatgatccaaaatgccgaagaatttgctgctggtggcattccgttcatttttgacccaggtcaggcactgccgctgttcaacggccccgaactgcgcgagtttatcgaacaggcggactatgtggtggtcaacgattacgaaagcaatcttcttcaagaacgtactggctggaacgagcaggacattgtttcacgcgtgcaggcgtatatcaccacgcaaggttcgaaaggagccctggtacatacaccggagaagacctacgatattccgccggcacacgaacgtcgttcggttgatccaactggttgcggcgacgcgtttcgcgccggcctgatctatggtattcagcataattatgattggttgaccattggccgcatgggaaacttaatgggtgcgctgaaagtggaacaccctggcacgcaaaatcagcgtttcgattttgccgaattcaacgaccagttcaaacaagattttggctacgcgctc

SEQ ID NO: 468 - protein, 321 aa, synthetic construct
  REGION 1..321: note = Variant of adenosine kinase
MHHHHHHGGSGMSALICGSLAYDTIMVFPDQFKNHILPDRVHRLNVSFLVPRMRREFGGCAGNIAYNLHLLGGAPIPMGTVGQDFGPYREHFETLGIDLSRVKIIDDLSTPQAFITTDHDHNQITAFHPGAMMRSYENHVRDVPGVTLGLVGPDGREGMIQNAEEFAAGGIPFIFDPGQALPLFNGPELREFIEQADYVVVNDYESNLLQERTGWNEQDIVSRVQAYITTQGSKGALVHTPEKTYDIPPAHERRSVDPTGCGDAFRAGLIYGIQHNYDWLTIGRMGNLMGALKVEHPGTQNQRFDFAEFNDQFKQDFGYAL

SEQ ID NO: 469 - DNA, 963 bp, synthetic construct
  misc_feature 1..963: note = Variant of adenosine kinase
  source 1..963: mol_type = other DNA
atgcaccatcatcaccatcacgggggctccggcatgagtgcactgatttgcggttctttagcgtatgataccatcatggtgtttccggaccagttcaagaaccatattctgcccgatcgtgttcaccgcctcaatgtcagctttcttgtaccacgcatgcgtcgtgaatttggaggctgtgccggcaacattgcgtacaatctgcatctgttgggtggtgctccgatccctatgggaacggtgggccaagatttcggtccgtatcgcgagcacttcgaaactctgggcattgacttatcccgcgtcaagatcatcgatgatctgagtacaccgcaggccttcattaccaccgaccatgatttgaaccagattacggcgtttcatccaggcgcaatgatgcgttcgtacgaaaatcacgttcgtgatgtgccgggtgttaccttgggcctcgtaggtcctgatggacgcgagggcatgatccaaaatgccgaagaatttgctgctggtggcattccgttcatttttgacccaggtcaggcactgccgctgttcaacggccccgaactgcgcgagtttatcgaacaggcggactatgtggtggtcaacgattacgaaagcaatcttcttcaagaacgtactggctggaacgagcaggacattgtttcacgcgtgcaggcgtatatcaccacgcaaggttcgaaaggagccctggtacatacaccggagaagacctacgatattccgccggcacacgaacgtcgtgtcgttgatccaactggttgcggcgacgcgtttcgcgccggcctgatctatggtattcagcataattatgattggttgaccattggccgcatgggaaacttaatgggtgcgctgaaagtggaacaccctggcacgcaaaatcagcgtttcgattttgccgaattcaacgaccagttcaaacaagattttggctacgcgctc

SEQ ID NO: 470 - protein, 321 aa, synthetic construct
  REGION 1..321: note = Variant of adenosine kinase
MHHHHHHGGSGMSALICGSLAYDTIMVFPDQFKNHILPDRVHRLNVSFLVPRMRREFGGCAGNIAYNLHLLGGAPIPMGTVGQDFGPYREHFETLGIDLSRVKIIDDLSTPQAFITTDHDLNQITAFHPGAMMRSYENHVRDVPGVTLGLVGPDGREGMIQNAEEFAAGGIPFIFDPGQALPLFNGPELREFIEQADYVVVNDYESNLLQERTGWNEQDIVSRVQAYITTQGSKGALVHTPEKTYDIPPAHERRVVDPTGCGDAFRAGLIYGIQHNYDWLTIGRMGNLMGALKVEHPGTQNQRFDFAEFNDQFKQDFGYAL

SEQ ID NO: 471 - DNA, 963 bp, synthetic construct
  misc_feature 1..963: note = Variant of adenosine kinase
  source 1..963: mol_type = other DNA
atgcaccatcatcaccatcacgggggctccggcatgagtgcactgatttgcggttctttagcgtatgataccatcatggtgtttccggaccagttcaagaaccatattctgcccgatcgtgttcaccgcctcaatgtcagctttcttgtaccacgcatgcgtcgtgaatttggaggctgtgccggcaacattgcgtacaatctgcatctgttgggtggtgctccgatccctatgggaacggtgggccaagatttcggtccgtatcgcgagcacttcgaaactctgggcattgacttatcccgcgtcaagatcatcgatgatctgagtacaccgcaggccttcattaccaccgaccatgatcataaccagattacggcgtttcatccaggcgcaatgatgcgttcgtacgaaaatcacgttcgtgatgtgccgggtgttaccttgggcctcgtaggtcctgatggacgcgagggcatgatccaaaatgccgaagaatttgctgctggtggcattccgttcatttttgacccaggtcaggcactgccgctgttcaacggccccgaactgcgcgagtttatcgaacaggcggactatgtggtggtcaacgattacgaaagcaatcttcttcaagaacgtactggctggaacgagcaggacattgtttcacgcgtgcaggcgtatatcaccacgcaaggttcgaaaggagccctggtacatacaccggagaagacctacgatattccgccggcacacgaacgtcgtgaggttgatccaactggttgcggcgacgcgtttcgcgccggcctgatctatggtattcagcataattatgattggttgaccattggccgcatgggaaacttaatgggtgcgctgaaagtggaacaccctggcacgcaaaatcagcgtttcgattttgccgaattcaacgaccagttcaaacaagattttggctacgcgctc

SEQ ID NO: 472 - protein, 321 aa, synthetic construct
  REGION 1..321: note = Variant of adenosine kinase
MHHHHHHGGSGMSALICGSLAYDTIMVFPDQFKNHILPDRVHRLNVSFLVPRMRREFGGCAGNIAYNLHLLGGAPIPMGTVGQDFGPYREHFETLGIDLSRVKIIDDLSTPQAFITTDHDHNQITAFHPGAMMRSYENHVRDVPGVTLGLVGPDGREGMIQNAEEFAAGGIPFIFDPGQALPLFNGPELREFIEQADYVVVNDYESNLLQERTGWNEQDIVSRVQAYITTQGSKGALVHTPEKTYDIPPAHERREVDPTGCGDAFRAGLIYGIQHNYDWLTIGRMGNLMGALKVEHPGTQNQRFDFAEFNDQFKQDFGYAL

SEQ ID NO: 473 - DNA, 963 bp, synthetic construct
  misc_feature 1..963: note = Variant of adenosine kinase
  source 1..963: mol_type = other DNA
atgcaccatcatcaccatcacgggggctccggcatgagtgcactgatttgcggttctttagcgtatgataccatcatggtgtttccggaccagttcaagaaccatattctgcccgatcgtgttcaccgcctcaatgtcagctttcttgtaccacgcatgcgtcgtgaatttggaggctgtgccggcaacattgcgtacaatctgcatctgttgggtggtgctccgatccctatgggaacggtgggccaagatttcggtccgtatcgcgagcacttcgaaactctgggcattgacttatcccgcgtcaagatcatcgatgatctgagtacaccgcaggccttcattaccaccgacatggatcataaccagattacggcgtttcatccaggcgcaatgatgcgttcgtacgaaaatcacgttcgtgatgtgccgggtgttaccttgggcctcgtaggtcctgatggacgcgagggcatgatccaaaatgccgaagaatttgctgctggtggcattccgttcatttttgacccaggtcaggcactgccgctgttcaacggccccgaactgcgcgagtttatcgaacaggcggactatgtggtggtcaacgattacgaaagcaatcttcttcaagaacgtactggctggaacgagcaggacattgtttcacgcgtgcaggcgtatatcaccacgcaaggttcgaaaggagccctggtacatacaccggagaagacctacgatattccgccggcacacgaacgtcgtgtcgttgatccaactggttgcggcgacgcgtttcgcgccggcctgatctatggtattcagcataattatgattggttgaccattggccgcatgggaaacttaatgggtgcgctgaaagtggaacaccctggcacgcaaaatcagcgtttcgattttgccgaattcaacgaccagttcaaacaagattttggctacgcgctc

SEQ ID NO: 474 - protein, 321 aa, synthetic construct
  REGION 1..321: note = Variant of adenosine kinase
MHHHHHHGGSGMSALICGSLAYDTIMVFPDQFKNHILPDRVHRLNVSFLVPRMRREFGGCAGNIAYNLHLLGGAPIPMGTVGQDFGPYREHFETLGIDLSRVKIIDDLSTPQAFITTDMDHNQITAFHPGAMMRSYENHVRDVPGVTLGLVGPDGREGMIQNAEEFAAGGIPFIFDPGQALPLFNGPELREFIEQADYVVVNDYESNLLQERTGWNEQDIVSRVQAYITTQGSKGALVHTPEKTYDIPPAHERRVVDPTGCGDAFRAGLIYGIQHNYDWLTIGRMGNLMGALKVEHPGTQNQRFDFAEFNDQFKQDFGYAL

SEQ ID NO: 475 - DNA, 963 bp, synthetic construct
  misc_feature 1..963: note = Variant of adenosine kinase
  source 1..963: mol_type = other DNA
atgcaccatcatcaccatcacgggggctccggcatgagtgcactgatttgcggttctttagcgtatgataccatcatggtgtttccggaccagttcaagaaccatattctgcccgatcgtgttcaccgcctcaatgtcagctttcttgtaccacgcatgcgtcgtgaatttggaggctgtgccggcaacattgcgtacaatctgcatctgttgggtggtgctccgatccctatgggaacggtgggccaagatttcggtccgtatcgcgagcacttcgaaactctgggcattgacttatcccgcgtcaagatcatcgatgatctgagtacaccgcaggccttcattaccaccgaccatgatcataaccagattacggcgtttcatccaggcgcaatgatgcgttcgtacgaaaatcacgttcgtgatgtgccgggtgttaccttgggcctcgtaggtcctgatggacgcgagggcatgatccaaaatgccgaagaatttgctgctggtggcattccgttcatttttgacccaggtcaggcactgccgctgttcaacggccccgaactgcgcgagtttatcgaacaggcggactatgtggtggtcaacgattacgaaagcaatcttcttcaagaacgtactggctggaacgagcaggacattgtttcacgcgtgcaggcgtatatcaccacgcaaggttcgaaaggagccctggtacatacaccggagaagacctacgatattccgccggcacacgaacgtcgtgtctgtgatccaactggttgcggcgacgcgtttcgcgccggcctgatctatggtattcagcataattatgattggttgaccattggccgcatgggaaacttaatgggtgcgctgaaagtggaacaccctggcacgcaaaatcagcgtttcgattttgccgaattcaacgaccagttcaaacaagattttggctacgcgctc

SEQ ID NO: 476 - protein, 321 aa, synthetic construct
  REGION 1..321: note = Variant of adenosine kinase
MHHHHHHGGSGMSALICGSLAYDTIMVFPDQFKNHILPDRVHRLNVSFLVPRMRREFGGCAGNIAYNLHLLGGAPIPMGTVGQDFGPYREHFETLGIDLSRVKIIDDLSTPQAFITTDHDHNQITAFHPGAMMRSYENHVRDVPGVTLGLVGPDGREGMIQNAEEFAAGGIPFIFDPGQALPLFNGPELREFIEQADYVVVNDYESNLLQERTGWNEQDIVSRVQAYITTQGSKGALVHTPEKTYDIPPAHERRVCDPTGCGDAFRAGLIYGIQHNYDWLTIGRMGNLMGALKVEHPGTQNQRFDFAEFNDQFKQDFGYAL

SEQ ID NO: 477 - DNA, 963 bp, synthetic construct
  misc_feature 1..963: note = Variant of adenosine kinase
  source 1..963: mol_type = other DNA
atgcaccatcatcaccatcacgggggctccggcatgagtgcactgatttgcggttctttagcgtatgataccatcatggtgtttccggaccagttcaagaaccatattctgcccgatcgtgttcaccgcctcaatgtcagctttcttgtaccacgcatgcgtcgtgaatttggaggctgtgccggcaacattgcgtacaatctgcatctgttgggtggtgctccgatccctatgggaacggtgggccaagatttcggtccgtatcgcgagcacttcgaaactctgggcattgacttatcccgcgtcaagatcatcgatgatctgagtacaccgcaggccttcattaccaccgaccatgatcataaccagattacggcgtttcatccaggcgcaatgatgcgttcgtacgaaaatcacgttcgtgatgtgccgggtgttaccttgggcctcgtaggtcctgatggacgcgagggcatgatccaaaatgccgaagaatttgctgctggtggcattccgttcatttttgacccaggtcaggcactgccgctgttcaacggccccgaactgcgcgagtttatcgaacaggcggactatgtggtggtcaacgattacgaaagcaatcttcttcaagaacgtactggctggaacgagcaggacattgtttcacgcgtgcaggcgtatatcaccacgcaaggttcgaaaggagccctggtacatacaccggagaagacctacgatattccgccggcacacgaacgtcgtggggttgatccaactggttgcggcgacgcgtttcgcgccggcctgatctatggtattcagcataattatgattggttgaccattggccgcatgggaaacttaatgggtgcgctgaaagtggaacaccctggcacgcaaaatcagcgtttcgattttgccgaattcaacgaccagttcaaacaagattttggctacgcgctc

SEQ ID NO: 478 - protein, 321 aa, synthetic construct
  REGION 1..321: note = Variant of adenosine kinase
MHHHHHHGGSGMSALICGSLAYDTIMVFPDQFKNHILPDRVHRLNVSFLVPRMRREFGGCAGNIAYNLHLLGGAPIPMGTVGQDFGPYREHFETLGIDLSRVKIIDDLSTPQAFITTDHDHNQITAFHPGAMMRSYENHVRDVPGVTLGLVGPDGREGMIQNAEEFAAGGIPFIFDPGQALPLFNGPELREFIEQADYVVVNDYESNLLQERTGWNEQDIVSRVQAYITTQGSKGALVHTPEKTYDIPPAHERRGVDPTGCGDAFRAGLIYGIQHNYDWLTIGRMGNLMGALKVEHPGTQNQRFDFAEFNDQFKQDFGYAL

SEQ ID NO: 479 - DNA, 963 bp, synthetic construct
  misc_feature 1..963: note = Variant of adenosine kinase
  source 1..963: mol_type = other DNA
atgcaccatcatcaccatcacgggggctccggcatgagtgcactgatttgcggttctttagcgtatgataccatcatggtgtttccggaccagttcaagaaccatattctgcccgatcgtgttcaccgcctcaatgtcagctttcttgtaccacgcatgcgtcgtgaatttggaggctgtgccggcaacattgcgtacaatctgcatctgttgggtggtgctccgatccctatgggaacggtgggccaagatttcggtccgtatcgcgagcacttcgaaactctgggcattgacttatcccgcgtcaagatcatcgatgatctgagtacaccgcaggccttcattaccaccgaccatgatcataaccagattacggcgtttcatccaggcgcaatgatgcgttcgtacgaaaatcacgttcgtgatgtgccgggtgttaccttgggcctcgtaggtcctgatggacgcgagggcatgatccaaaatgccgaagaatttgctgctggtggcattccgttcatttttgacccaggtcaggcactgccgctgttcaacggccccgaactgcgcgagtttatcgaacaggcggactatgtggtggtcaacgattacgaaagcaatcttcttcaagaacgtactggctggaacgagcaggacattgtttcacgcgtgcaggcgtatatcaccacgcaaggttcgaaaggagccattgtacatacaccggagaagacctacgatattccgccggcacacgaacgtcgtgtcgttgatccaactggttgcggcgacgcgtttcgcgccggcctgatctatggtattcagcataattatgattggttgaccattggccgcatgggaaacttaatgggtgcgctgaaagtggaacaccctggcacgcaaaatcagcgtttcgattttgccgaattcaacgaccagttcaaacaagattttggctacgcgctc

SEQ ID NO: 480 - protein, 321 aa, synthetic construct
  REGION 1..321: note = Variant of adenosine kinase
MHHHHHHGGSGMSALICGSLAYDTIMVFPDQFKNHILPDRVHRLNVSFLVPRMRREFGGCAGNIAYNLHLLGGAPIPMGTVGQDFGPYREHFETLGIDLSRVKIIDDLSTPQAFITTDHDHNQITAFHPGAMMRSYENHVRDVPGVTLGLVGPDGREGMIQNAEEFAAGGIPFIFDPGQALPLFNGPELREFIEQADYVVVNDYESNLLQERTGWNEQDIVSRVQAYITTQGSKGAIVHTPEKTYDIPPAHERRVVDPTGCGDAFRAGLIYGIQHNYDWLTIGRMGNLMGALKVEHPGTQNQRFDFAEFNDQFKQDFGYAL

SEQ ID NO: 481 - DNA, 963 bp, synthetic construct
  misc_feature 1..963: note = Variant of adenosine kinase
  source 1..963: mol_type = other DNA
atgcaccatcatcaccatcacgggggctccggcatgagtgcactgatttgcggttctttagcgtatgataccatcatggtgtttccggaccagttcaagaaccatattctgcccgatcgtgttcaccgcctcaatgtcagctttcttgtaccacgcatgcgtcgtgaatttggaggctgtgccggcaacattgcgtacaatctgcatctgttgggtggtgctccgatccctatgggaacggtgggccaagatttcggtccgtatcgcgagcacttcgaaactctgggcattgacttatcccgcgtcaagatcatcgatgatctgagtacaccgcaggccttcattaccaccgaccatgatcataaccagattacggcgtttcatccaggcgcaatgatgcgttcgtacgaaaatcacgttcgtgatgtgccgggtgttaccttgggcctcgtaggtcctgatggacgcgagggcatgatccaaaatgccgaagaatttgctgctggtggcattccgttcatttttgacccaggtcaggcactgccgctgttcaacggccccgaactgcgcgagtttatcgaacaggcggactatgtggtggtcaacgattacgaaagcaatcttcttcaagaacgtactggctggaacgagcaggacattgtttcacgcgtgcaggcgtatatcaccacgcaaggttcgaaaggagccctggtacatacaccggagaagacctacgatattccgctggcacacgaacgtcgtgtcgttgatccaactggttgcggcgacgcgtttcgcgccggcctgatctatggtattcagcataattatgattggttgaccattggccgcatgggaaacttaatgggtgcgctgaaagtggaacaccctggcacgcaaaatcagcgtttcgattttgccgaattcaacgaccagttcaaacaagattttggctacgcgctc

SEQ ID NO: 482 - protein, 321 aa, synthetic construct
  REGION 1..321: note = Variant of adenosine kinase
MHHHHHHGGSGMSALICGSLAYDTIMVFPDQFKNHILPDRVHRLNVSFLVPRMRREFGGCAGNIAYNLHLLGGAPIPMGTVGQDFGPYREHFETLGIDLSRVKIIDDLSTPQAFITTDHDHNQITAFHPGAMMRSYENHVRDVPGVTLGLVGPDGREGMIQNAEEFAAGGIPFIFDPGQALPLFNGPELREFIEQADYVVVNDYESNLLQERTGWNEQDIVSRVQAYITTQGSKGALVHTPEKTYDIPLAHERRVVDPTGCGDAFRAGLIYGIQHNYDWLTIGRMGNLMGALKVEHPGTQNQRFDFAEFNDQFKQDFGYAL

SEQ ID NO: 483 - DNA, 963 bp, synthetic construct
  misc_feature 1..963: note = Variant of adenosine kinase
  source 1..963: mol_type = other DNA
atgcaccatcatcaccatcacgggggctccggcatgagtgcactgatttgcggttcttttgcgtatgataccatcatggtgtttccggaccagttcaagaaccatattctgcccgatcgtgttcaccgcctcaatgtcagctttcttgtaccacgcatgcgtcgtgaatttggaggctgtgccggcaacattgcgtacaatctgcatctgttgggtggtgctccgatccctatgggaacggtgggccaagatttcggtccgtatcgcgagcacttcgaaactctgggcattgacttatcccgcgtcaagatcatcgatgatctgagtacaccgcaggccttcattaccaccgaccatgatcataaccagattacggcgtttcatccaggcgcaatgatgcgttcgtacgaaaatcacgttcgtgatgtgccgggtgttaccttgggcctcgtaggtcctgatggacgcgagggcatgatccaaaatgccgaagaatttgctgctggtggcattccgttcatttttgacccaggtcaggcactgccgctgttcaacggccccgaactgcgcgagtttatcgaacaggcggactatgtggtggtcaacgattacgaaagcaatcttcttcaagaacgtactggctggaacgagcaggacattgtttcacgcgtgcaggcgtatatcaccacgcaaggttcgaaaggagccctggtacatacaccggagaagacctacgatattccgccggcacacgaacgtcgtgtcgttgatccaactggttgcggcgacgcgtttcgcgccggcctgatctatggtattcagcataattatgattggttgaccattggccgcatgggaaacttaatgggtgcgctgaaagtggaacaccctggcacgcaaaatcagcgtttcgattttgccgaattcaacgaccagttcaaacaagattttggctacgcgctc

SEQ ID NO: 484 - protein, 321 aa, synthetic construct
  REGION 1..321: note = Variant of adenosine kinase
MHHHHHHGGSGMSALICGSFAYDTIMVFPDQFKNHILPDRVHRLNVSFLVPRMRREFGGCAGNIAYNLHLLGGAPIPMGTVGQDFGPYREHFETLGIDLSRVKIIDDLSTPQAFITTDHDHNQITAFHPGAMMRSYENHVRDVPGVTLGLVGPDGREGMIQNAEEFAAGGIPFIFDPGQALPLFNGPELREFIEQADYVVVNDYESNLLQERTGWNEQDIVSRVQAYITTQGSKGALVHTPEKTYDIPPAHERRVVDPTGCGDAFRAGLIYGIQHNYDWLTIGRMGNLMGALKVEHPGTQNQRFDFAEFNDQFKQDFGYAL

SEQ ID NO: 485 - DNA, 963 bp, synthetic construct
  misc_feature 1..963: note = Variant of adenosine kinase
  source 1..963: mol_type = other DNA
atgcaccatcatcaccatcacgggggctccggcatgagtgcactgatttgcggttctttagcgtatgataccatcatggtgtttccggaccagttcaagaaccatattctgcccgatcgtgttcaccgcctcaatgtcagctttcttgtaccacgcatgcgtcgtgaatttggaggctgtgccggcaacattgcgtacaatctgcatctgttgggtggtgctccgatccctatgggaacggtgggccaagatttcggtccgtatcgcgagcacttcgaaactctgggcattgacttatcccgcgtcaagatcatcgatgatctgagtacaccgcaggccttcattaccaccgaccatgatcataaccagattacggcgtttcatccaggcgcaatgatgcgttcgtacgaaaatcacgttcgtgatgtgccgggtgttaccttgggcctcgtaggtcctgatggacgcgagggcatgatccaaaatgccgaagaatttgctgctggtggcattccgttcatttttgacccaggtcaggcactgccgctgttcaacggccccgaactgcgcgagtttatcgaacaggcggactatgtggtggtcaacgattacgaaagcaatcttcttcaagaacgtactggctggaacgagcaggacattgtttcacgcgtgcaggcgtatatcaccacgcaaggttcgaaaggagccctggtacatacaccggagaagacctacgatattccgccggcacacgaacgtcgtaaggttgatccaactggttgcggcgacgcgtttcgcgccggcctgatctatggtattcagcataattatgattggttgaccattggccgcatgggaaacttaatgggtgcgctgaaagtggaacaccctggcacgcaaaatcagcgtttcgattttgccgaattcaacgaccagttcaaacaagattttggctacgcgctc

SEQ ID NO: 486 - protein, 321 aa, synthetic construct
  REGION 1..321: note = Variant of adenosine kinase
MHHHHHHGGSGMSALICGSLAYDTIMVFPDQFKNHILPDRVHRLNVSFLVPRMRREFGGCAGNIAYNLHLLGGAPIPMGTVGQDFGPYREHFETLGIDLSRVKIIDDLSTPQAFITTDHDHNQITAFHPGAMMRSYENHVRDVPGVTLGLVGPDGREGMIQNAEEFAAGGIPFIFDPGQALPLFNGPELREFIEQADYVVVNDYESNLLQERTGWNEQDIVSRVQAYITTQGSKGALVHTPEKTYDIPPAHERRKVDPTGCGDAFRAGLIYGIQHNYDWLTIGRMGNLMGALKVEHPGTQNQRFDFAEFNDQFKQDFGYAL

SEQ ID NO: 487 - DNA, 963 bp, synthetic construct
  misc_feature 1..963: note = Variant of adenosine kinase
  source 1..963: mol_type = other DNA
atgcaccatcatcaccatcacgggggctccggcatgagtgcactgatttgcggttctttagcgtatgataccatcatggtgtttccggaccagttcaagaaccatattctgcccgatcgtgttcaccgcctcaatgtcagctttcttgtaccacgcatgcgtcgtgaatttggaggctgtgccggcaacattgcgtacaatctgcatctgttgggtggtgctccgatccctatgggaacggtgggccaagatttcggtccgtatcgcgagcacttcgaaactctgggcattgacttatcccgcgtcaagatcatcgatgatctgagtacaccgcaggccttcattaccaccgaccatgatcataaccagattacggcgtttcatccaggcgcaatgatgcgttcgtacgaaaatcacgttcgtgatgtgccgggtgttaccttgggcctcgtaggtcctgatggacgcgagggcatgatccaaaatgccgaagaatttgctgctggtggcattccgttcatttttgacccaggtcaggcactgccgctgttcaacggccccgaactgcgcgagtttatcgaacaggcggactatgtggtggtcaacgattacgaaagcaatcttcttcaagaacgtactggctggaacgagcaggacattgtttcacgcgtgcaggcgtatatcaccacgcaaggttcgaaaggagccgtggtacatacaccggagaagacctacgatattccgccggcacacgaacgtcgtgtcgttgatccaactggttgcggcgacgcgtttcgcgccggcctgatctatggtattcagcataattatgattggttgaccattggccgcatgggaaacttaatgggtgcgctgaaagtggaacaccctggcacgcaaaatcagcgtttcgattttgccgaattcaacgaccagttcaaacaagattttggctacgcgctc

SEQ ID NO: 488 - protein, 321 aa, synthetic construct
  REGION 1..321: note = Variant of adenosine kinase
MHHHHHHGGSGMSALICGSLAYDTIMVFPDQFKNHILPDRVHRLNVSFLVPRMRREFGGCAGNIAYNLHLLGGAPIPMGTVGQDFGPYREHFETLGIDLSRVKIIDDLSTPQAFITTDHDHNQITAFHPGAMMRSYENHVRDVPGVTLGLVGPDGREGMIQNAEEFAAGGIPFIFDPGQALPLFNGPELREFIEQADYVVVNDYESNLLQERTGWNEQDIVSRVQAYITTQGSKGAVVHTPEKTYDIPPAHERRVVDPTGCGDAFRAGLIYGIQHNYDWLTIGRMGNLMGALKVEHPGTQNQRFDFAEFNDQFKQDFGYAL

SEQ ID NO: 489 - DNA, 963 bp, synthetic construct
  misc_feature 1..963: note = Variant of adenosine kinase
  source 1..963: mol_type = other DNA
atgcaccatcatcaccatcacgggggctccggcatgagtgcactgatttgcggttctttagcgtatgataccatcatggtgtttccggaccagttcaagaaccatattctgcccgatcgtgttcaccgcctcaatgtcagctttcttgtaccacgcatgcgtcgtgaatttggaggctgtgccggcaacattgcgtacaatctgcatctgttgggtggtgctccgatccctatgggaacggtgggccaagatttcggtccgtatcgcgagcacttcgaaactctgggcattgacttatcccgcgtcaagatcatcgatgatctgagtacaccgcaggccttcattaccaccgaccatgatcataaccagattacggcgtttcatccaggcgcaatgatgcgttcgtacgaaaatcacgttcgtgatgtgccgggtgttaccttgggcctcgtaggtcctgatggacgcgagggcatgatccaaaatgccgaagaatttgctgctggtggcattccgttcatttttgacccaggtcaggcactgccgctgttcaacggccccgaactgcgcgagtttatcgaacaggcggactatgtggtggtcaacgattacgaaagcaatcttcttcaagaacgtactggctggaacgagcaggacattgtttcacgcgtgcaggcgtatatcaccacgcaaggttcggctggagccctggtacatacaccggagaagacctacgatattccgccggcacacgaacgtcgtgtcgttgatccaactggttgcggcgacgcgtttcgcgccggcctgatctatggtattcagcataattatgattggttgaccattggccgcatgggaaacttaatgggtgcgctgaaagtggaacaccctggcacgcaaaatcagcgtttcgattttgccgaattcaacgaccagttcaaacaagattttggctacgcgctc

SEQ ID NO: 490 - protein, 321 aa, synthetic construct
  REGION 1..321: note = Variant of adenosine kinase
MHHHHHHGGSGMSALICGSLAYDTIMVFPDQFKNHILPDRVHRLNVSFLVPRMRREFGGCAGNIAYNLHLLGGAPIPMGTVGQDFGPYREHFETLGIDLSRVKIIDDLSTPQAFITTDHDHNQITAFHPGAMMRSYENHVRDVPGVTLGLVGPDGREGMIQNAEEFAAGGIPFIFDPGQALPLFNGPELREFIEQADYVVVNDYESNLLQERTGWNEQDIVSRVQAYITTQGSAGALVHTPEKTYDIPPAHERRVVDPTGCGDAFRAGLIYGIQHNYDWLTIGRMGNLMGALKVEHPGTQNQRFDFAEFNDQFKQDFGYAL

SEQ ID NO: 491 - DNA, 963 bp, synthetic construct
  misc_feature 1..963: note = Variant of adenosine kinase
  source 1..963: mol_type = other DNA
atgcaccatcatcaccatcacgggggctccggcatgagtgcactgatttgcggttctttagcgtatgataccatcatggtgtttccggaccagttcaagaaccatattctgcccgatcgtgttcaccgcctcaatgtcagctttcttgtaccacgcatgcgtcgtgaatttggaggctgtgccggcaacattgcgtacaatctgcatctgttgggtggtgctccgatccctatgggaacggtgggccaagatttcggtccgtatcgcgagcacttcgaaactctgggcattgacttatcccgcgtcaagatcatcgatgatctgagtacaccgcaggccttcattaccaccgaccatgatcataaccagattacggcgtttcatccaggcgcaatgatgcgttcgtacgaaaatcacgttcgtgatgtgccgggtgttaccttgggcctcgtaggtcctgatggacgcgagggcatgatccaaaatgccgaagaatttgctgctggtggcattccgttcatttttgacccaggtcaggcactgccgctgttcaacggccccgaactgcgcgagtttatcgaacaggcggactatgtggtggtcaacgattacgaaagcaatcttcttcaagaacgtactggctggaacgagcaggacattgtttcacgcgtgcaggcgtatatcaccacgcaaggttcgaaaggagccctggtacatacaccggagaagacctacgatattccgccggcacacgaacgtcaggtcgttgatccaactggttgcggcgacgcgtttcgcgccggcctgatctatggtattcagcataattatgattggttgaccattggccgcatgggaaacttaatgggtgcgctgaaagtggaacaccctggcacgcaaaatcagcgtttcgattttgccgaattcaacgaccagttcaaacaagattttggctacgcgctc

SEQ ID NO: 492 - protein, 321 aa, synthetic construct
  REGION 1..321: note = Variant of adenosine kinase
MHHHHHHGGSGMSALICGSLAYDTIMVFPDQFKNHILPDRVHRLNVSFLVPRMRREFGGCAGNIAYNLHLLGGAPIPMGTVGQDFGPYREHFETLGIDLSRVKIIDDLSTPQAFITTDHDHNQITAFHPGAMMRSYENHVRDVPGVTLGLVGPDGREGMIQNAEEFAAGGIPFIFDPGQALPLFNGPELREFIEQADYVVVNDYESNLLQERTGWNEQDIVSRVQAYITTQGSKGALVHTPEKTYDIPPAHERQVVDPTGCGDAFRAGLIYGIQHNYDWLTIGRMGNLMGALKVEHPGTQNQRFDFAEFNDQFKQDFGYAL

SEQ ID NO: 493 - DNA, 963 bp, synthetic construct
  misc_feature 1..963: note = Variant of adenosine kinase
  source 1..963: mol_type = other DNA
atgcaccatcatcaccatcacgggggctccggcatgagtgcactgatttgcggttctttagcgtatgataccatcatggtgtttccggaccagttcaagaaccatattctgcccgatcgtgttcaccgcctcaatgtcagctttcttgtaccacgcatgcgtcgtgaatttggaggctgtgccggcaacattgcgtacaatctgcatctgttgggtggtgctccgatccctatgggaacggtgggccaagatttcggtccgtatcgcgagcacttcgaaactctgggcattgacttatcccgcgtcaagatcatcgatgatctgagtacaccgcaggccttcattaccaccgaccatgatcataaccagattacggcgtttcatccaggcgcaatgatgcgttcgtacgaaaatcacgttcgtgatgtgccgggtgttaccttgggcctcgtaggtcctgatggacgcgagggcatgatccaaaatgccgaagaatttgctgctggtggcattccgttcatttttgacccaggtcaggcactgccgctgttcaacggccccgaactgcgcgagtttatcgaacaggcggactatgtggtggtcaacgattacgaaagcaatcttcttcaagaacgtactggctggaacgagcaggacattgtttcacgcgtgcaggcgtatatcaccacgcaaggttcgaaaggagccctggtacatacaccggagaagacctacgatattccgccggcacacgaacgtcgtgtcatggatccaactggttgcggcgacgcgtttcgcgccggcctgatctatggtattcagcataattatgattggttgaccattggccgcatgggaaacttaatgggtgcgctgaaagtggaacaccctggcacgcaaaatcagcgtttcgattttgccgaattcaacgaccagttcaaacaagattttggctacgcgctc

SEQ ID NO: 494 - protein, 321 aa, synthetic construct
  REGION 1..321: note = Variant of adenosine kinase
MHHHHHHGGSGMSALICGSLAYDTIMVFPDQFKNHILPDRVHRLNVSFLVPRMRREFGGCAGNIAYNLHLLGGAPIPMGTVGQDFGPYREHFETLGIDLSRVKIIDDLSTPQAFITTDHDHNQITAFHPGAMMRSYENHVRDVPGVTLGLVGPDGREGMIQNAEEFAAGGIPFIFDPGQALPLFNGPELREFIEQADYVVVNDYESNLLQERTGWNEQDIVSRVQAYITTQGSKGALVHTPEKTYDIPPAHERRVMDPTGCGDAFRAGLIYGIQHNYDWLTIGRMGNLMGALKVEHPGTQNQRFDFAEFNDQFKQDFGYAL

SEQ ID NO: 495 - DNA, 963 bp, synthetic construct
  misc_feature 1..963: note = Variant of adenosine kinase
  source 1..963: mol_type = other DNA
atgcaccatcatcaccatcacgggggctccggcatgagtgcactgatttgcggttctttagcgtatgataccatcatggtgtttccggaccagttcaagaaccatattctgcccgatcgtgttcaccgcctcaatgtcagctttcttgtaccacgcatgcgtcgttattttggaggctgtgccggcaacattgcgtacaatctgcatctgttgggtggtgctccgatccctatgggaacggtgggccaagatttcggtccgtatcgcgagcacttcgaaactctgggcattgacttatcccgcgtcaagatcatcgatgatctgagtacaccgcaggccttcattaccaccgaccatgatcataaccagattacggcgtttcatccaggcgcaatgatgcgttcgtacgaaaatcacgttcgtgatgtgccgggtgttaccttgggcctcgtaggtcctgatggacgcgagggcatgatccaaaatgccgaagaatttgctgctggtggcattccgttcatttttgacccaggtcaggcactgccgctgttcaacggccccgaactgcgcgagtttatcgaacaggcggactatgtggtggtcaacgattacgaaagcaatcttcttcaagaacgtactggctggaacgagcaggacattgtttcacgcgtgcaggcgtatatcaccacgcaaggttcgaaaggagccctggtacatacaccggagaagacctacgatattccgccggcacacgaacgtcgtgtcgttgatccaactggttgcggcgacgcgtttcgcgccggcctgatctatggtattcagcataattatgattggttgaccattggccgcatgggaaacttaatgggtgcgctgaaagtggaacaccctggcacgcaaaatcagcgtttcgattttgccgaattcaacgaccagttcaaacaagattttggctacgcgctc

SEQ ID NO: 496 - protein, 321 aa, synthetic construct
  REGION 1..321: note = Variant of adenosine kinase
MHHHHHHGGSGMSALICGSLAYDTIMVFPDQFKNHILPDRVHRLNVSFLVPRMRRYFGGCAGNIAYNLHLLGGAPIPMGTVGQDFGPYREHFETLGIDLSRVKIIDDLSTPQAFITTDHDHNQITAFHPGAMMRSYENHVRDVPGVTLGLVGPDGREGMIQNAEEFAAGGIPFIFDPGQALPLFNGPELREFIEQADYVVVNDYESNLLQERTGWNEQDIVSRVQAYITTQGSKGALVHTPEKTYDIPPAHERRVVDPTGCGDAFRAGLIYGIQHNYDWLTIGRMGNLMGALKVEHPGTQNQRFDFAEFNDQFKQDFGYAL

SEQ ID NO: 497 - DNA, 963 bp, synthetic construct
  misc_feature 1..963: note = Variant of adenosine kinase
  source 1..963: mol_type = other DNA
atgcaccatcatcaccatcacgggggctccggcatgagtgcactgatttgcggttctttagcgtatgataccatcatggtgtttccggaccagttcaagaaccatattctgcccgatcgtgttcaccgcctcaatgtcagctttcttgtaccacgcatgcgtcgtttttttggaggctgtgccggcaacattgcgtacaatctgcatctgttgggtggtgctccgatccctatgggaacggtgggccaagatttcggtccgtatcgcgagcacttcgaaactctgggcattgacttatcccgcgtcaagatcatcgatgatctgagtacaccgcaggccttcattaccaccgaccatgatcataaccagattacggcgtttcatccaggcgcaatgatgcgttcgtacgaaaatcacgttcgtgatgtgccgggtgttaccttgggcctcgtaggtcctgatggacgcgagggcatgatccaaaatgccgaagaatttgctgctggtggcattccgttcatttttgacccaggtcaggcactgccgctgttcaacggccccgaactgcgcgagtttatcgaacaggcggactatgtggtggtcaacgattacgaaagcaatcttcttcaagaacgtactggctggaacgagcaggacattgtttcacgcgtgcaggcgtatatcaccacgcaaggttcgaaaggagccctggtacatacaccggagaagacctacgatattccgccggcacacgaacgtcgtgtcgttgatccaactggttgcggcgacgcgtttcgcgccggcctgatctatggtattcagcataattatgattggttgaccattggccgcatgggaaacttaatgggtgcgctgaaagtggaacaccctggcacgcaaaatcagcgtttcgattttgccgaattcaacgaccagttcaaacaagattttggctacgcgctc

SEQ ID NO: 498 - protein, 321 aa, synthetic construct
  REGION 1..321: note = Variant of adenosine kinase
MHHHHHHGGSGMSALICGSLAYDTIMVFPDQFKNHILPDRVHRLNVSFLVPRMRRFFGGCAGNIAYNLHLLGGAPIPMGTVGQDFGPYREHFETLGIDLSRVKIIDDLSTPQAFITTDHDHNQITAFHPGAMMRSYENHVRDVPGVTLGLVGPDGREGMIQNAEEFAAGGIPFIFDPGQALPLFNGPELREFIEQADYVVVNDYESNLLQERTGWNEQDIVSRVQAYITTQGSKGALVHTPEKTYDIPPAHERRVVDPTGCGDAFRAGLIYGIQHNYDWLTIGRMGNLMGALKVEHPGTQNQRFDFAEFNDQFKQDFGYAL

SEQ ID NO: 499 - DNA, 963 bp, synthetic construct
  misc_feature 1..963: note = Variant of adenosine kinase
  source 1..963: mol_type = other DNA
atgcaccatcatcaccatcacgggggctccggcatgagtgcactgatttgcggttctttagcgtatgataccatcatggtgtttccggaccagttcaagaaccatattctgcccgatcgtgttcaccgcctcaatgtcagctttcttgtaccacgcatgcgtcgtgaatttggaggctgtgccggcaacattgcgtacaatctgcatctgttgggtggtgctccgatccctatgggaacggtgggccaagatttcggtccgtatcgcgagcacttcgaaactctgggcattgacttatcccgcgtcaagatcatcgatgatctgagtacaccgcaggccttcattaccaccgaccatgatcataaccagattacggcgtttcatccaggcgcaatgatgcgttcgtacgaaaatcacgttcgtgatgtgccgggtgttaccttgggcctcgtaggtcctgatggacgcgagggcatgatccaaaatgccgaagaatttgctgctggtggcattccgttcatttttgacccaggtcaggcactgccgctgttcaacggccccgaactgcgcgagtttatcgaacaggcggactatgtggtggtcaacgattacgaaagcaatcttcttcaagaacgtactggctggaacgagcaggacattgtttcacgcgtgcaggcgtatatcaccacgcaaggttcgaaaggagccctggtacatacaccggagaagacctacgatattccgatggcacacgaacgtcgtgtcgttgatccaactggttgcggcgacgcgtttcgcgccggcctgatctatggtattcagcataattatgattggttgaccattggccgcatgggaaacttaatgggtgcgctgaaagtggaacaccctggcacgcaaaatcagcgtttcgattttgccgaattcaacgaccagttcaaacaagattttggctacgcgctc

SEQ ID NO: 500 - protein, 321 aa, synthetic construct
  REGION 1..321: note = Variant of adenosine kinase
MHHHHHHGGSGMSALICGSLAYDTIMVFPDQFKNHILPDRVHRLNVSFLVPRMRREFGGCAGNIAYNLHLLGGAPIPMGTVGQDFGPYREHFETLGIDLSRVKIIDDLSTPQAFITTDHDHNQITAFHPGAMMRSYENHVRDVPGVTLGLVGPDGREGMIQNAEEFAAGGIPFIFDPGQALPLFNGPELREFIEQADYVVVNDYESNLLQERTGWNEQDIVSRVQAYITTQGSKGALVHTPEKTYDIPMAHERRVVDPTGCGDAFRAGLIYGIQHNYDWLTIGRMGNLMGALKVEHPGTQNQRFDFAEFNDQFKQDFGYAL

SEQ ID NO: 501 - DNA, 963 bp, synthetic construct
  misc_feature 1..963: note = Variant of adenosine kinase
  source 1..963: mol_type = other DNA
atgcaccatcatcaccatcacgggggctccggcatgagtgcactgatttgcggttctttagcgtatgataccatcatggtgtttccggaccagttcaagaaccatattctgcccgatcgtgttcaccgcctcaatgtcagctttcttgtaccacgcatgcgtcgtgaatttggaggctgtgccggcaacattgcgtacaatctgcatctgttgggtggtgctccgatccctatgggaacggtgggccaagatttcggtccgtatcgcgagcacttcgaaactctgggcattgacttatcccgcgtcaagatcatcgatgatctgagtacaccgcaggccttcattaccaccgacactgatcataaccagattacggcgtttcatccaggcgcaatgatgcgttcgtacgaaaatcacgttcgtgatgtgccgggtgttaccttgggcctcgtaggtcctgatggacgcgagggcatgatccaaaatgccgaagaatttgctgctggtggcattccgttcatttttgacccaggtcaggcactgccgctgttcaacggccccgaactgcgcgagtttatcgaacaggcggactatgtggtggtcaacgattacgaaagcaatcttcttcaagaacgtactggctggaacgagcaggacattgtttcacgcgtgcaggcgtatatcaccacgcaaggttcgaaaggagccctggtacatacaccggagaagacctacgatattccgccggcacacgaacgtcgtgtcgttgatccaactggttgcggcgacgcgtttcgcgccggcctgatctatggtattcagcataattatgattggttgaccattggccgcatgggaaacttaatgggtgcgctgaaagtggaacaccctggcacgcaaaatcagcgtttcgattttgccgaattcaacgaccagttcaaacaagattttggctacgcgctc

SEQ ID NO: 502 - protein, 321 aa, synthetic construct
  REGION 1..321: note = Variant of adenosine kinase
MHHHHHHGGSGMSALICGSLAYDTIMVFPDQFKNHILPDRVHRLNVSFLVPRMRREFGGCAGNIAYNLHLLGGAPIPMGTVGQDFGPYREHFETLGIDLSRVKIIDDLSTPQAFITTDTDHNQITAFHPGAMMRSYENHVRDVPGVTLGLVGPDGREGMIQNAEEFAAGGIPFIFDPGQALPLFNGPELREFIEQADYVVVNDYESNLLQERTGWNEQDIVSRVQAYITTQGSKGALVHTPEKTYDIPPAHERRVVDPTGCGDAFRAGLIYGIQHNYDWLTIGRMGNLMGALKVEHPGTQNQRFDFAEFNDQFKQDFGYAL

SEQ ID NO: 503 - DNA, 963 bp, synthetic construct
  misc_feature 1..963: note = Variant of adenosine kinase
  source 1..963: mol_type = other DNA
atgcaccatcatcaccatcacgggggctccggcatgagtgcactgatttgcggttctttagcgtatgataccatcatggtgtttccggaccagttcaagaaccatattctgcccgatcgtgttcaccgcctcaatgtcagctttcttgtaccacgcatgcgtcgtgaatttggaggctgtgccggcaacattgcgtacaatctgcatctgttgggtggtgctccgatccctatgggaacggtgggccaagatttcggtccgtatcgcgagcacttcgaaactctgggcattgacttatcccgcgtcaagatcatcgatgatctgagtacaccgcaggccttcattaccaccgaccatgatcataaccagattacggcgtttcatccaggcgcaatgatgcgttcgtacgaaaatcacgttcgtgatgtgccgggtgttaccttgggcctcgtaggtcctgatggacgcgagggcatgatccaaaatgccgaagaatttgctgctggtggcattccgttcatttttgacccaggtcaggcactgccgctgttcaacggccccgaactgcgcgagtttatcgaacaggcggactatgtggtggtcaacgattacgaaagcaatcttcttcaagaacgtactggctggaacgagcaggacattgtttcacgcgtgcaggcgtatatcaccacgcaaggttcgaaaggagccctggtacatacaccggagaagacctacgatattccgccggcacacgaacgtcgtgtcgttgatccaactggttgcggcgacgcgtttcgcgccggcctgatctatggtattcagcataattatgattggttgaccattggccgcatgggagtgttaatgggtgcgctgaaagtggaacaccctggcacgcaaaatcagcgtttcgattttgccgaattcaacgaccagttcaaacaagattttggctacgcgctc

SEQ ID NO: 504 - protein, 321 aa, synthetic construct
  REGION 1..321: note = Variant of adenosine kinase
MHHHHHHGGSGMSALICGSLAYDTIMVFPDQFKNHILPDRVHRLNVSFLVPRMRREFGGCAGNIAYNLHLLGGAPIPMGTVGQDFGPYREHFETLGIDLSRVKIIDDLSTPQAFITTDHDHNQITAFHPGAMMRSYENHVRDVPGVTLGLVGPDGREGMIQNAEEFAAGGIPFIFDPGQALPLFNGPELREFIEQADYVVVNDYESNLLQERTGWNEQDIVSRVQAYITTQGSKGALVHTPEKTYDIPPAHERRVVDPTGCGDAFRAGLIYGIQHNYDWLTIGRMGVLMGALKVEHPGTQNQRFDFAEFNDQFKQDFGYAL

SEQ ID NO: 505 - DNA, 963 bp, synthetic construct
  misc_feature 1..963: note = Variant of adenosine kinase
  source 1..963: mol_type = other DNA
atgcaccatcatcaccatcacgggggctccggcatgagtgcactgatttgcggttctttagcgtatgataccatcatggtgtttccggaccagttcaagaaccatattctgcccgatcgtgttcaccgcctcaatgtcagctttcttgtaccacgcatgcgtcgtgaatttggaggctgtgccggcaacattgcgtacaatctgcatctgttgggtggtgctccgatccctatgggaacggtgggccaagatttcggtccgtatcgcgagcacttcgaaactctgggcattgacttatcccgcgtcaagatcatcgatgatctgagtacaccgcaggccttcattaccaccgaccatgattttaaccagattacggcgtttcatccaggcgcaatgatgcgttcgtacgaaaatcacgttcgtgatgtgccgggtgttaccttgggcctcgtaggtcctgatggacgcgagggcatgatccaaaatgccgaagaatttgctgctggtggcattccgttcatttttgacccaggtcaggcactgccgctgttcaacggccccgaactgcgcgagtttatcgaacaggcggactatgtggtggtcaacgattacgaaagcaatcttcttcaagaacgtactggctggaacgagcaggacattgtttcacgcgtgcaggcgtatatcaccacgcaaggttcgaaaggagccctggtacatacaccggagaagacctacgatattccgccggcacacgaacgtcgtgtcgttgatccaactggttgcggcgacgcgtttcgcgccggcctgatctatggtattcagcataattatgattggttgaccattggccgcatgggaaacttaatgggtgcgctgaaagtggaacaccctggcacgcaaaatcagcgtttcgattttgccgaattcaacgaccagttcaaacaagattttggctacgcgctc

SEQ ID NO: 506 - protein, 321 aa, synthetic construct
  REGION 1..321: note = Variant of adenosine kinase
MHHHHHHGGSGMSALICGSLAYDTIMVFPDQFKNHILPDRVHRLNVSFLVPRMRREFGGCAGNIAYNLHLLGGAPIPMGTVGQDFGPYREHFETLGIDLSRVKIIDDLSTPQAFITTDHDFNQITAFHPGAMMRSYENHVRDVPGVTLGLVGPDGREGMIQNAEEFAAGGIPFIFDPGQALPLFNGPELREFIEQADYVVVNDYESNLLQERTGWNEQDIVSRVQAYITTQGSKGALVHTPEKTYDIPPAHERRVVDPTGCGDAFRAGLIYGIQHNYDWLTIGRMGNLMGALKVEHPGTQNQRFDFAEFNDQFKQDFGYAL

SEQ ID NO: 507 - DNA, 963 bp, synthetic construct
  misc_feature 1..963: note = Variant of adenosine kinase
  source 1..963: mol_type = other DNA
atgcaccatcatcaccatcacgggggctccggcatgagtgcactgatttgcggttctttagcgtatgataccatcatggtgtttccggaccagttcaagaaccatattctgcccgatcgtgttcaccgcctcaatgtcagctttcttgtaccacgcatgcgtcgtgaatttggaggctgtgccggcaacattgcgtacaatctgcatctgttgggtggtgctccgatccctatgggaacggtgggccaagatttcggtccgtatcgcgagcacttcgaaactctgggcattgacttatcccgcgtcaagatcatcgatgatctgagtacaccgcaggccttcattaccaccgacagtgatcataaccagattacggcgtttcatccaggcgcaatgatgcgttcgtacgaaaatcacgttcgtgatgtgccgggtgttaccttgggcctcgtaggtcctgatggacgcgagggcatgatccaaaatgccgaagaatttgctgctggtggcattccgttcatttttgacccaggtcaggcactgccgctgttcaacggccccgaactgcgcgagtttatcgaacaggcggactatgtggtggtcaacgattacgaaagcaatcttcttcaagaacgtactggctggaacgagcaggacattgtttcacgcgtgcaggcgtatatcaccacgcaaggttcgaaaggagccctggtacatacaccggagaagacctacgatattccgccggcacacgaacgtcgtgtcgttgatccaactggttgcggcgacgcgtttcgcgccggcctgatctatggtattcagcataattatgattggttgaccattggccgcatgggaaacttaatgggtgcgctgaaagtggaacaccctggcacgcaaaatcagcgtttcgattttgccgaattcaacgaccagttcaaacaagattttggctacgcgctc

SEQ ID NO: 508 - protein, 321 aa, synthetic construct
  REGION 1..321: note = Variant of adenosine kinase
MHHHHHHGGSGMSALICGSLAYDTIMVFPDQFKNHILPDRVHRLNVSFLVPRMRREFGGCAGNIAYNLHLLGGAPIPMGTVGQDFGPYREHFETLGIDLSRVKIIDDLSTPQAFITTDSDHNQITAFHPGAMMRSYENHVRDVPGVTLGLVGPDGREGMIQNAEEFAAGGIPFIFDPGQALPLFNGPELREFIEQADYVVVNDYESNLLQERTGWNEQDIVSRVQAYITTQGSKGALVHTPEKTYDIPPAHERRVVDPTGCGDAFRAGLIYGIQHNYDWLTIGRMGNLMGALKVEHPGTQNQRFDFAEFNDQFKQDFGYAL

SEQ ID NO: 509 - DNA, 963 bp, synthetic construct
  misc_feature 1..963: note = Variant of adenosine kinase
  source 1..963: mol_type = other DNA
atgcaccatcatcaccatcacgggggctccggcatgagtgcactgatttgcggttctttagcgtatgataccatcatggtgtttccggaccagttcaagaaccatattctgcccgatcgtgttcaccgcctcaatgtcagctttcttgtaccacgcatgcgtcgtgaatttggaggctgtgccggcaacattgcgtacaatctgcatctgttgggtggtgctccgatccctatgggaacggtgggccaagatttcggtccgtatcgcgagcacttcgaaactctgggcattgacttatcccgcgtcaagatcatcgatgatctgagtacaccgcaggccttcattaccaccgaccatgatcataaccagattacggcgtttcatccaggcgcaatgatgcgttcgtacgaaaatcacgttcgtgatgtgccgggtgttaccttgggcctcgtaggtcctgatggacgcgagggcatgatccaaaatgccgaagaatttgctgctggtggcattccgttcatttttgacccaggtcaggcactgccgctgttcaacggccccgaactgcgcgagtttatcgaacaggcggactatgtggtggtcaacgattacgaaagcaatcttcttcaagaacgtactggctggaacgagcaggacattgtttcacgcgtgcaggcgtatatcaccacgcaaggttcgaaaggagccctggtacatacaccggagaagacctacgatattccgccggcacacaagcgtcgtgtcgttgatccaactggttgcggcgacgcgtttcgcgccggcctgatctatggtattcagcataattatgattggttgaccattggccgcatgggaaacttaatgggtgcgctgaaagtggaacaccctggcacgcaaaatcagcgtttcgattttgccgaattcaacgaccagttcaaacaagattttggctacgcgctc

SEQ ID NO: 510 - protein, 321 aa, synthetic construct
  REGION 1..321: note = Variant of adenosine kinase
MHHHHHHGGSGMSALICGSLAYDTIMVFPDQFKNHILPDRVHRLNVSFLVPRMRREFGGCAGNIAYNLHLLGGAPIPMGTVGQDFGPYREHFETLGIDLSRVKIIDDLSTPQAFITTDHDHNQITAFHPGAMMRSYENHVRDVPGVTLGLVGPDGREGMIQNAEEFAAGGIPFIFDPGQALPLFNGPELREFIEQADYVVVNDYESNLLQERTGWNEQDIVSRVQAYITTQGSKGALVHTPEKTYDIPPAHKRRVVDPTGCGDAFRAGLIYGIQHNYDWLTIGRMGNLMGALKVEHPGTQNQRFDFAEFNDQFKQDFGYAL

SEQ ID NO: 511 - DNA, 963 bp, synthetic construct
  misc_feature 1..963: note = Variant of adenosine kinase
  source 1..963: mol_type = other DNA
atgcaccatcatcaccatcacgggggctccggcatgagtgcactgatttgcggttctttagcgtatgataccatcatggtgtttccggaccagttcaagaaccatattctgcccgatcgtgttcaccgcctcaatgtcagctttcttgtaccacgcatgcgtcgtggttttggaggctgtgccggcaacattgcgtacaatctgcatctgttgggtggtgctccgatccctatgggaacggtgggccaagatttcggtccgtatcgcgagcacttcgaaactctgggcattgacttatcccgcgtcaagatcatcgatgatctgagtacaccgcaggccttcattaccaccgaccatgatcataaccagattacggcgtttcatccaggcgcaatgatgcgttcgtacgaaaatcacgttcgtgatgtgccgggtgttaccttgggcctcgtaggtcctgatggacgcgagggcatgatccaaaatgccgaagaatttgctgctggtggcattccgttcatttttgacccaggtcaggcactgccgctgttcaacggccccgaactgcgcgagtttatcgaacaggcggactatgtggtggtcaacgattacgaaagcaatcttcttcaagaacgtactggctggaacgagcaggacattgtttcacgcgtgcaggcgtatatcaccacgcaaggttcgaaaggagccctggtacatacaccggagaagacctacgatattccgccggcacacgaacgtcgtgtcgttgatccaactggttgcggcgacgcgtttcgcgccggcctgatctatggtattcagcataattatgattggttgaccattggccgcatgggaaacttaatgggtgcgctgaaagtggaacaccctggcacgcaaaatcagcgtttcgattttgccgaattcaacgaccagttcaaacaagattttggctacgcgctc

SEQ ID NO: 512 - protein, 321 aa, synthetic construct
  REGION 1..321: note = Variant of adenosine kinase
MHHHHHHGGSGMSALICGSLAYDTIMVFPDQFKNHILPDRVHRLNVSFLVPRMRRGFGGCAGNIAYNLHLLGGAPIPMGTVGQDFGPYREHFETLGIDLSRVKIIDDLSTPQAFITTDHDHNQITAFHPGAMMRSYENHVRDVPGVTLGLVGPDGREGMIQNAEEFAAGGIPFIFDPGQALPLFNGPELREFIEQADYVVVNDYESNLLQERTGWNEQDIVSRVQAYITTQGSKGALVHTPEKTYDIPPAHERRVVDPTGCGDAFRAGLIYGIQHNYDWLTIGRMGNLMGALKVEHPGTQNQRFDFAEFNDQFKQDFGYAL

SEQ ID NO: 513 - DNA, 963 bp, synthetic construct
  misc_feature 1..963: note = Variant of adenosine kinase
  source 1..963: mol_type = other DNA
atgcaccatcatcaccatcacgggggctccggcatgagtgcactgatttgcggttctttagcgtatgataccatcatggtgtttccggaccagttcaagaaccatattctgcccgatcgtgttcaccgcctcaatgtcagctttcttgtaccacgcatgcgtcgtgaatttggaggctgtgccggcaacattgcgtacaatctgcatctgttgggtggtgctccgatccctatgggaacggtgggccaagatttcggtccgtatcgcgagcacttcgaaactctgggcattgacttatcccgcgtcaagatcatcgatgatctgagtacaccgcaggccttcattaccaccgaccatgatcataaccagattacggcgtttcatccaggcgcaatgatgcgttcgtacgaaaatcacgttcgtgatgtgccgggtgttaccttgggcctcgtaggtcctgatggacgcgagggcatgatccaaaatgccgaagaatttgctgctggtggcattccgttcatttttgacccaggtcaggcactgccgctgttcaacggccccgaactgcgcgagtttatcgaacaggcggactatgtggtggtcaacgattacgaaagcaatcttcttcaagaacgtactggctggaacgagcaggacattgtttcacgcgtgcaggcgtatatcaccacgcaaggttcgaaaggagccctggtacatacaccggagaagacctacgatattccgccggcacacgaacgtcgtgtcgttgatccaactggttgcggcgacgcgtttcgcgccggcctgatctatggtattcagcataattatgattggttgaccattggccgcatgggaaacttaatgggtgcgctgaaagtggaacaccctggcacgcaaaatcagcgtttcgattttgccgaattcaacgaccagttcaaacaagattggggctacgcgctc

SEQ ID NO: 514 - protein, 321 aa, synthetic construct
  REGION 1..321: note = Variant of adenosine kinase
MHHHHHHGGSGMSALICGSLAYDTIMVFPDQFKNHILPDRVHRLNVSFLVPRMRREFGGCAGNIAYNLHLLGGAPIPMGTVGQDFGPYREHFETLGIDLSRVKIIDDLSTPQAFITTDHDHNQITAFHPGAMMRSYENHVRDVPGVTLGLVGPDGREGMIQNAEEFAAGGIPFIFDPGQALPLFNGPELREFIEQADYVVVNDYESNLLQERTGWNEQDIVSRVQAYITTQGSKGALVHTPEKTYDIPPAHERRVVDPTGCGDAFRAGLIYGIQHNYDWLTIGRMGNLMGALKVEHPGTQNQRFDFAEFNDQFKQDWGYAL

SEQ ID NO: 515 - DNA, 963 bp, synthetic construct
  misc_feature 1..963: note = Variant of adenosine kinase
  source 1..963: mol_type = other DNA
atgcaccatcatcaccatcacgggggctccggcatgagtgcactgatttgcggttctttagcgtatgataccatcatggtgtttccggaccagttcaagaaccatattctgcccgatcgtgttcaccgcctcaatgtcagctttcttgtaccacgcatgcgtcgtgaatttggaggctgtgccggcaacattgcgtacaatctgcatctgttgggtggtgctccgatccctatgggaacggtgggccaagatttcggtccgtatcgcgagcacttcgaaactctgggcattgacttatcccgcgtcaagatcatcgatgatctgagtacaccgcaggccttcattaccaccgacgttgatcataaccagattacggcgtttcatccaggcgcaatgatgcgttcgtacgaaaatcacgttcgtgatgtgccgggtgttaccttgggcctcgtaggtcctgatggacgcgagggcatgatccaaaatgccgaagaatttgctgctggtggcattccgttcatttttgacccaggtcaggcactgccgctgttcaacggccccgaactgcgcgagtttatcgaacaggcggactatgtggtggtcaacgattacgaaagcaatcttcttcaagaacgtactggctggaacgagcaggacattgtttcacgcgtgcaggcgtatatcaccacgcaaggttcgaaaggagccctggtacatacaccggagaagacctacgatattccgccggcacacgaacgtcgtgtcgttgatccaactggttgcggcgacgcgtttcgcgccggcctgatctatggtattcagcataattatgattggttgaccattggccgcatgggaaacttaatgggtgcgctgaaagtggaacaccctggcacgcaaaatcagcgtttcgattttgccgaattcaacgaccagttcaaacaagattttggctacgcgctc

SEQ ID NO: 516 - protein, 321 aa, synthetic construct
  REGION 1..321: note = Variant of adenosine kinase
MHHHHHHGGSGMSALICGSLAYDTIMVFPDQFKNHILPDRVHRLNVSFLVPRMRREFGGCAGNIAYNLHLLGGAPIPMGTVGQDFGPYREHFETLGIDLSRVKIIDDLSTPQAFITTDVDHNQITAFHPGAMMRSYENHVRDVPGVTLGLVGPDGREGMIQNAEEFAAGGIPFIFDPGQALPLFNGPELREFIEQADYVVVNDYESNLLQERTGWNEQDIVSRVQAYITTQGSKGALVHTPEKTYDIPPAHERRVVDPTGCGDAFRAGLIYGIQHNYDWLTIGRMGNLMGALKVEHPGTQNQRFDFAEFNDQFKQDFGYAL

SEQ ID NO: 517 - DNA, 963 bp, synthetic construct
  misc_feature 1..963: note = Variant of adenosine kinase
  source 1..963: mol_type = other DNA
atgcaccatcatcaccatcacgggggctccggcatgagtgcactgatttgcggttctttagcgtatgataccatcatggtgtttccggaccagttcaagaaccatattctgcccgatcgtgttcaccgcctcaatgtcagctttcttgtaccacgcatgcgtcgtgaatttggaggctgtgccggcaacattgcgtacaatctgcatctgttgggtggtgctccgatccctatgggaacggtgggccaagatttcggtccgtatcgcgagcacttcgaaactctgggcattgacttatcccgcgtcaagatcatcgatgatctgagtacaccgcaggccttcattaccaccgaccatgatcataaccagattacggcgtttcatccaggcgcaatgatgcgttcgtacgaaaatcacgttcgtgatgtgccgggtgttaccttgggcctcgtaggtcctgatggacgcgagggcatgatccaaaatgccgaagaatttgctgctggtggcattccgttcatttttgacccaggtcaggcactgccgctgttcaacggccccgaactgcgcgagtttatcgaacaggcggactatgtggtggtcaacgattacgaaagcaatcttcttcaagaacgtactggctggaacgagcaggacattgtttcacgcgtgcaggcgtatatcaccacgcaaggttcgaaaggagccctggtacatacaccggagaagacctacgatattccgccggcacacgaacgtcgtgtcgttgatccaactggttgcggcgacgcgtttcgcgccggcctgatctatggtattcagcataattatgattggttgaccattggccgcatgggaaacttaatgggtgcgctgaaagtggaacaccctggcagtcaaaatcagcgtttcgattttgccgaattcaacgaccagttcaaacaagattttggctacgcgctc

SEQ ID NO: 518 - protein, 321 aa, synthetic construct
  REGION 1..321: note = Variant of adenosine kinase
MHHHHHHGGSGMSALICGSLAYDTIMVFPDQFKNHILPDRVHRLNVSFLVPRMRREFGGCAGNIAYNLHLLGGAPIPMGTVGQDFGPYREHFETLGIDLSRVKIIDDLSTPQAFITTDHDHNQITAFHPGAMMRSYENHVRDVPGVTLGLVGPDGREGMIQNAEEFAAGGIPFIFDPGQALPLFNGPELREFIEQADYVVVNDYESNLLQERTGWNEQDIVSRVQAYITTQGSKGALVHTPEKTYDIPPAHERRVVDPTGCGDAFRAGLIYGIQHNYDWLTIGRMGNLMGALKVEHPGSQNQRFDFAEFNDQFKQDFGYAL

SEQ ID NO: 519 - DNA, 963 bp, synthetic construct
  misc_feature 1..963: note = Variant of adenosine kinase
  source 1..963: mol_type = other DNA
atgcaccatcatcaccatcacgggggctccggcatgagtgcactgatttgcggttctttagcgtatgataccatcatggtgtttccggaccagttcaagaaccatattctgcccgatcgtgttcaccgcctcaatgtcagctttcttgtaccacgcatgcgtcgtgaatttggaggctgtgccggcaacattgcgtacaatctgcatctgttgggtggtgctccgatccctatgggaacggtgggccaagatttcggtccgtatcgcgagcacttcgaaactctgggcattgacttatcccgcgtcaagatcatcgatgatctgagtacaccgcaggccttcattaccaccgaccatgatcataaccagattacggcgtttcatccaggcgcaatgatgcgttcgtacgaaaatcacgttcgtgatgtgccgggtgttaccttgggcctcgtaggtcctgatggacgcgagggcatgatccaaaatgccgaagaatttgctgctggtggcattccgttcatttttgacccaggtcaggcactgccgctgttcaacggccccgaactgcgcgagtttatcgaacaggcggactatgtggtggtcaacgattacgaaagcaatcttcttcaagaacgtactggctggaacgagcaggacattgtttcacgcgtgcaggcgtatatctgtacgcaaggttcgaaaggagccctggtacatacaccggagaagacctacgatattccgccggcacacgaacgtcgtgtcgttgatccaactggttgcggcgacgcgtttcgcgccggcctgatctatggtattcagcataattatgattggttgaccattggccgcatgggaaacttaatgggtgcgctgaaagtggaacaccctggcacgcaaaatcagcgtttcgattttgccgaattcaacgaccagttcaaacaagattttggctacgcgctc

SEQ ID NO: 520 - protein, 321 aa, synthetic construct
  REGION 1..321: note = Variant of adenosine kinase
MHHHHHHGGSGMSALICGSLAYDTIMVFPDQFKNHILPDRVHRLNVSFLVPRMRREFGGCAGNIAYNLHLLGGAPIPMGTVGQDFGPYREHFETLGIDLSRVKIIDDLSTPQAFITTDHDHNQITAFHPGAMMRSYENHVRDVPGVTLGLVGPDGREGMIQNAEEFAAGGIPFIFDPGQALPLFNGPELREFIEQADYVVVNDYESNLLQERTGWNEQDIVSRVQAYICTQGSKGALVHTPEKTYDIPPAHERRVVDPTGCGDAFRAGLIYGIQHNYDWLTIGRMGNLMGALKVEHPGTQNQRFDFAEFNDQFKQDFGYAL

SEQ ID NO: 521 - DNA, 963 bp, synthetic construct
  misc_feature 1..963: note = Variant of adenosine kinase
  source 1..963: mol_type = other DNA
atgcaccatcatcaccatcacgggggctccggcatgagtgcactgatttgcggttctttagcgtatgataccatcatggtgtttccggaccagttcaagaaccatattctgcccgatcgtgttcaccgcctcaatgtcagctttcttgtaccacgcatgcgtcgtgaatttggaggctgtgccggcaacattgcgtacaatctgcatctgttgggtggtgctccgatccctatgggaacggtgggccaagatttcggtccgtatcgcgagcacttcgaaactctgggcattgacttatcccgcgtcaagatcatcgatgatctgagtacaccgcaggccttcattaccaccgactgtgatcataaccagattacggcgtttcatccaggcgcaatgatgcgttcgtacgaaaatcacgttcgtgatgtgccgggtgttaccttgggcctcgtaggtcctgatggacgcgagggcatgatccaaaatgccgaagaatttgctgctggtggcattccgttcatttttgacccaggtcaggcactgccgctgttcaacggccccgaactgcgcgagtttatcgaacaggcggactatgtggtggtcaacgattacgaaagcaatcttcttcaagaacgtactggctggaacgagcaggacattgtttcacgcgtgcaggcgtatatcaccacgcaaggttcgaaaggagccctggtacatacaccggagaagacctacgatattccgccggcacacgaacgtcgtgtcgttgatccaactggttgcggcgacgcgtttcgcgccggcctgatctatggtattcagcataattatgattggttgaccattggccgcatgggaaacttaatgggtgcgctgaaagtggaacaccctggcacgcaaaatcagcgtttcgattttgccgaattcaacgaccagttcaaacaagattttggctacgcgctc

SEQ ID NO: 522 - protein, 321 aa, synthetic construct
  REGION 1..321: note = Variant of adenosine kinase
MHHHHHHGGSGMSALICGSLAYDTIMVFPDQFKNHILPDRVHRLNVSFLVPRMRREFGGCAGNIAYNLHLLGGAPIPMGTVGQDFGPYREHFETLGIDLSRVKIIDDLSTPQAFITTDCDHNQITAFHPGAMMRSYENHVRDVPGVTLGLVGPDGREGMIQNAEEFAAGGIPFIFDPGQALPLFNGPELREFIEQADYVVVNDYESNLLQERTGWNEQDIVSRVQAYITTQGSKGALVHTPEKTYDIPPAHERRVVDPTGCGDAFRAGLIYGIQHNYDWLTIGRMGNLMGALKVEHPGTQNQRFDFAEFNDQFKQDFGYAL

SEQ ID NO: 523 - DNA, 963 bp, synthetic construct
  misc_feature 1..963: note = Variant of adenosine kinase
  source 1..963: mol_type = other DNA
atgcaccatcatcaccatcacgggggctccggcatgagtgcactgatttgcggttctttagcgtatgataccatcatggtgtttccggaccagttcaagaaccatattctgcccgatcgtgttcaccgcctcaatgtcagctttcttgtaccacgcatgcgtcgtgaatttggaggctgtgccggcaacattgcgtacaatctgcatctgttgggtggtgctccgatccctatgggaacggtgggccaagatttcggtccgtatcgcgagcacttcgaaactctgggcattgacttatcccgcgtcaagatcatcgatgatctgagtacaccgcaggccttcattaccaccgaccatgatcataaccagattacggcgtttcatccaggcgcaatgatgcgttcgtacgaaaatcacgttcgtgatgtgccgggtgttaccttgggcctcgtaggtcctgatggacgcgagggcatgatccaaaatgccgaagaatttgctgctggtggcattccgttcatttttgacccaggtcaggcactgccgctgttcaacggccccgaactgcgcgagtttatcgaacaggcggactatgtggtggtcaacgattacgaaagcaatcttcttcaagaacgtactggctggaacgagcaggacattgtttcacgcgtgcaggcgtatatcaccacgcaaggttcgaaaggagccctggtacatacaccggagaagacctacgatattccgccgattcacgaacgtcgtgtcgttgatccaactggttgcggcgacgcgtttcgcgccggcctgatctatggtattcagcataattatgattggttgaccattggccgcatgggaaacttaatgggtgcgctgaaagtggaacaccctggcacgcaaaatcagcgtttcgattttgccgaattcaacgaccagttcaaacaagattttggctacgcgctc

SEQ ID NO: 524 - protein, 321 aa, synthetic construct
  REGION 1..321: note = Variant of adenosine kinase
MHHHHHHGGSGMSALICGSLAYDTIMVFPDQFKNHILPDRVHRLNVSFLVPRMRREFGGCAGNIAYNLHLLGGAPIPMGTVGQDFGPYREHFETLGIDLSRVKIIDDLSTPQAFITTDHDHNQITAFHPGAMMRSYENHVRDVPGVTLGLVGPDGREGMIQNAEEFAAGGIPFIFDPGQALPLFNGPELREFIEQADYVVVNDYESNLLQERTGWNEQDIVSRVQAYITTQGSKGALVHTPEKTYDIPPIHERRVVDPTGCGDAFRAGLIYGIQHNYDWLTIGRMGNLMGALKVEHPGTQNQRFDFAEFNDQFKQDFGYAL

SEQ ID NO: 525 - DNA, 963 bp, synthetic construct
  misc_feature 1..963: note = Variant of adenosine kinase
  source 1..963: mol_type = other DNA
atgcaccatcatcaccatcacgggggctccggcatgagtgcactgatttgcggttctttagcgtatgataccatcatggtgtttccggaccagttcaagaaccatattctgcccgatcgtgttcaccgcctcaatgtcagctttcttgtaccacgcatgcgtcgtgaatttggaggctgtgccggcaacattgcgtacaatctgcatctgttgggtggtgctccgatccctatgggaacggtgggccaagatttcggtccgtatcgcgagcacttcgaaactctgggcattgacttatcccgcgtcaagatcatcgatgatctgagtacaccgcaggccttcattaccaccgaccatgatcataaccagattacggcgtttcatccaggcgcaatgatgcgttcgtacgaaaatcacgttcgtgatgtgccgggtgttaccttgggcctcgtaggtcctgatggacgcgagggcatgatccaaaatgccgaagaatttgctgctggtggcattccgttcatttttgacccaggtcaggcactgccgctgttcaacggccccgaactgcgcgagtttatcgaacaggcggactatgtggtggtcaacgattacgaaagcaatcttcttcaagaacgtactggctggaacgagcaggacattgtttcacgcgtgcaggcgtatatcaccacgcaaggttcgaaaggagccctggtacatacaccggagaagacctacgatattccgccggcacacgaacgtcttgtcgttgatccaactggttgcggcgacgcgtttcgcgccggcctgatctatggtattcagcataattatgattggttgaccattggccgcatgggaaacttaatgggtgcgctgaaagtggaacaccctggcacgcaaaatcagcgtttcgattttgccgaattcaacgaccagttcaaacaagattttggctacgcgctc

SEQ ID NO: 526 - protein, 321 aa, synthetic construct
  REGION 1..321: note = Variant of adenosine kinase
MHHHHHHGGSGMSALICGSLAYDTIMVFPDQFKNHILPDRVHRLNVSFLVPRMRREFGGCAGNIAYNLHLLGGAPIPMGTVGQDFGPYREHFETLGIDLSRVKIIDDLSTPQAFITTDHDHNQITAFHPGAMMRSYENHVRDVPGVTLGLVGPDGREGMIQNAEEFAAGGIPFIFDPGQALPLFNGPELREFIEQADYVVVNDYESNLLQERTGWNEQDIVSRVQAYITTQGSKGALVHTPEKTYDIPPAHERLVVDPTGCGDAFRAGLIYGIQHNYDWLTIGRMGNLMGALKVEHPGTQNQRFDFAEFNDQFKQDFGYAL

SEQ ID NO: 527 - DNA, 963 bp, synthetic construct
  misc_feature 1..963: note = Variant of adenosine kinase
  source 1..963: mol_type = other DNA
atgcaccatcatcaccatcacgggggctccggcatgagtgcactgatttgcggttctttagcgtatgataccatcatggtgtttccggaccagttcaagaaccatattctgcccgatcgtgttcaccgcctcaatgtcagctttcttgtaccacgcatgcgtcgtgaatttggaggctgtgccggcaacattgcgtacaatctgcatctgttgggtggtgctccgatccctatgggaacggtgggccaagatttcggtccgtatcgcgagcacttcgaaactctgggcattgacttatcccgcgtcaagatcatcgatgatctgagtacaccgcaggccttcattaccaccgaccatgatcataaccagattacggcgtttcatccaggcgcaatgatgcgttcgtacgaaaatcacgttcgtgatgtgccgggtgttaccttgggcctcgtaggtcctgatggacgcgagggcatgatccaaaatgccgaagaatttgctgctggtggcattccgttcatttttgacccaggtcaggcactgccgctgttcaacggccccgaactgcgcgagtttatcgaacaggcggactatgtggtggtcaacgattacgaaagcaatcttcttcaagaacgtactggctggaacgagcaggacattgtttcacgcgtgcaggcgtatatcaccacgcaaggttcgatgggagccctggtacatacaccggagaagacctacgatattccgccggcacacgaacgtcgtgtcgttgatccaactggttgcggcgacgcgtttcgcgccggcctgatctatggtattcagcataattatgattggttgaccattggccgcatgggaaacttaatgggtgcgctgaaagtggaacaccctggcacgcaaaatcagcgtttcgattttgccgaattcaacgaccagttcaaacaagattttggctacgcgctc

SEQ ID NO: 528 - protein, 321 aa, synthetic construct
  REGION 1..321: note = Variant of adenosine kinase
MHHHHHHGGSGMSALICGSLAYDTIMVFPDQFKNHILPDRVHRLNVSFLVPRMRREFGGCAGNIAYNLHLLGGAPIPMGTVGQDFGPYREHFETLGIDLSRVKIIDDLSTPQAFITTDHDHNQITAFHPGAMMRSYENHVRDVPGVTLGLVGPDGREGMIQNAEEFAAGGIPFIFDPGQALPLFNGPELREFIEQADYVVVNDYESNLLQERTGWNEQDIVSRVQAYITTQGSMGALVHTPEKTYDIPPAHERRVVDPTGCGDAFRAGLIYGIQHNYDWLTIGRMGNLMGALKVEHPGTQNQRFDFAEFNDQFKQDFGYAL

SEQ ID NO: 529 - DNA, 963 bp, synthetic construct
  misc_feature 1..963: note = Variant of adenosine kinase
  source 1..963: mol_type = other DNA
atgcaccatcatcaccatcacgggggctccggcatgagtgcactgatttgcggttctttagcgtatgataccatcatggtgtttccggaccagttcaagaaccatattctgcccgatcgtgttcaccgcctcaatgtcagctttcttgtaccacgcatgcgtcgtgaatttggaggctgtgccggcaacattgcgtacaatctgcatctgttgggtggtgctccgatccctatgggaacggtgggccaagatttcggtccgtatcgcgagcacttcgaaactctgggcattgacttatcccgcgtcaagatcatcgatgatctgagtacaccgcaggccttcattaccaccgaccatgatcataaccagattacggcgtttcatccaggcgcaatgatgcgttcgtacgaaaatcacgttcgtgatgtgccgggtgttaccttgggcctcgtaggtcctgatggacgcgagggcatgatccaaaatgccgaagaatttgctgctggtggcattccgttcatttttgacccaggtcaggcactgccgctgttcaacggccccgaactgcgcgagtttatcgaacaggcggactatgtggtggtcaacgattacgaaagcaatcttcttcaagaacgtactggctggaacgagcaggacattgtttcacgcgtgcaggcgtatatcgtgacgcaaggttcgaaaggagccctggtacatacaccggagaagacctacgatattccgccggcacacgaacgtcgtgtcgttgatccaactggttgcggcgacgcgtttcgcgccggcctgatctatggtattcagcataattatgattggttgaccattggccgcatgggaaacttaatgggtgcgctgaaagtggaacaccctggcacgcaaaatcagcgtttcgattttgccgaattcaacgaccagttcaaacaagattttggctacgcgctc

SEQ ID NO: 530 - protein, 321 aa, synthetic construct
  REGION 1..321: note = Variant of adenosine kinase
MHHHHHHGGSGMSALICGSLAYDTIMVFPDQFKNHILPDRVHRLNVSFLVPRMRREFGGCAGNIAYNLHLLGGAPIPMGTVGQDFGPYREHFETLGIDLSRVKIIDDLSTPQAFITTDHDHNQITAFHPGAMMRSYENHVRDVPGVTLGLVGPDGREGMIQNAEEFAAGGIPFIFDPGQALPLFNGPELREFIEQADYVVVNDYESNLLQERTGWNEQDIVSRVQAYIVTQGSKGALVHTPEKTYDIPPAHERRVVDPTGCGDAFRAGLIYGIQHNYDWLTIGRMGNLMGALKVEHPGTQNQRFDFAEFNDQFKQDFGYAL

SEQ ID NO: 531 - DNA, 963 bp, synthetic construct
  misc_feature 1..963: note = Variant of adenosine kinase
  source 1..963: mol_type = other DNA
atgcaccatcatcaccatcacgggggctccggcatgagtgcactgatttgcggttctttagcgtatgataccatcatggtgtttccggaccagttcaagaaccatattctgcccgatcgtgttcaccgcctcaatgtcagctttcttgtaccacgcatgcgtcgtgaatttggaggctgtgccggcaacattgcgtacaatctgcatctgttgggtggtgctccgatccctatgggaacggtgggccaagatttcggtccgtatcgcgagcacttcgaaactctgggcattgacttatcccgcgtcaagatcatcgatgatctgagtacaccgcaggccttcattaccaccgaccatgatcataaccagattacggcgtttcatccaggcgcaatgatgcgttcgtacgaaaatcacgttcgtgatgtgccgggtgttaccttgggcctcgtaggtcctgatggacgcgagggcatgatccaaaatgccgaagaatttgctgctggtggcattccgttcatttttgacccaggtcaggcactgccgctgttcaacggccccgaactgcgcgagtttatcgaacaggcggactatgtggtggtcaacgattacgaaagcaatcttcttcaagaacgtactggctggaacgagcaggacattgtttcacgcgtgcaggcgtatatcaccacgcaaggttcgtatggagccctggtacatacaccggagaagacctacgatattccgccggcacacgaacgtcgtgtcgttgatccaactggttgcggcgacgcgtttcgcgccggcctgatctatggtattcagcataattatgattggttgaccattggccgcatgggaaacttaatgggtgcgctgaaagtggaacaccctggcacgcaaaatcagcgtttcgattttgccgaattcaacgaccagttcaaacaagattttggctacgcgctc

SEQ ID NO: 532 - protein, 321 aa, synthetic construct
  REGION 1..321: note = Variant of adenosine kinase
MHHHHHHGGSGMSALICGSLAYDTIMVFPDQFKNHILPDRVHRLNVSFLVPRMRREFGGCAGNIAYNLHLLGGAPIPMGTVGQDFGPYREHFETLGIDLSRVKIIDDLSTPQAFITTDHDHNQITAFHPGAMMRSYENHVRDVPGVTLGLVGPDGREGMIQNAEEFAAGGIPFIFDPGQALPLFNGPELREFIEQADYVVVNDYESNLLQERTGWNEQDIVSRVQAYITTQGSYGALVHTPEKTYDIPPAHERRVVDPTGCGDAFRAGLIYGIQHNYDWLTIGRMGNLMGALKVEHPGTQNQRFDFAEFNDQFKQDFGYAL

SEQ ID NO: 533 - DNA, 963 bp, synthetic construct
  misc_feature 1..963: note = Variant of adenosine kinase
  source 1..963: mol_type = other DNA
atgcaccatcatcaccatcacgggggctccggcatgagtgcactgatttgcggttctttagcgtatgataccatcatggtgtttccggaccagttcaagaaccatattctgcccgatcgtgttcaccgcctcaatgtcagctttcttgtaccacgcatgcgtcgtgaatttggaggctgtgccggcaacattgcgtacaatctgcatctgttgggtggtgctccgatccctatgggaacggtgggccaagatttcggtccgtatcgcgagcacttcgaaactctgggcattgacttatcccgcgtcaagatcatcgatgatctgagtacaccgcaggccttcattaccaccgaccatgatcataaccagattacggcgtttcatccaggcgcaatgatgcgttcgtacgaaaatcacgttcgtgatgtgccgggtgttaccttgggcctcgtaggtcctgatggacgcgagggcatgatccaaaatgccgaagaatttgctgctggtggcattccgttcatttttgacccaggtcaggcactgccgctgttcaacggccccgaactgcgcgagtttatcgaacaggcggactatgtggtggtcaacgattacgaaagcaatcttcttcaagaacgtactggctggaacgagcaggacattgtttcacgcgtgcaggcgtatatcaccacgcaaggttcgaaaggagccctggtacatacaccggagaagacctacgatattccgccggcacacgaacgtcgtgtcgttgatccaactggttgcggcgacgcgtttcgcgccggcctgatctatggtattcagcataattatgattggttgaccattggccgcatgggatatttaatgggtgcgctgaaagtggaacaccctggcacgcaaaatcagcgtttcgattttgccgaattcaacgaccagttcaaacaagattttggctacgcgctc

SEQ ID NO: 534 - protein, 321 aa, synthetic construct
  REGION 1..321: note = Variant of adenosine kinase
MHHHHHHGGSGMSALICGSLAYDTIMVFPDQFKNHILPDRVHRLNVSFLVPRMRREFGGCAGNIAYNLHLLGGAPIPMGTVGQDFGPYREHFETLGIDLSRVKIIDDLSTPQAFITTDHDHNQITAFHPGAMMRSYENHVRDVPGVTLGLVGPDGREGMIQNAEEFAAGGIPFIFDPGQALPLFNGPELREFIEQADYVVVNDYESNLLQERTGWNEQDIVSRVQAYITTQGSKGALVHTPEKTYDIPPAHERRVVDPTGCGDAFRAGLIYGIQHNYDWLTIGRMGYLMGALKVEHPGTQNQRFDFAEFNDQFKQDFGYAL

SEQ ID NO: 535 - DNA, 963 bp, synthetic construct
  misc_feature 1..963: note = Variant of adenosine kinase
  source 1..963: mol_type = other DNA
atgcaccatcatcaccatcacgggggctccggcatgagtgcactgatttgcggttctttagcgtatgataccatcatggtgtttccggaccagttcaagaaccatattctgcccgatcgtgttcaccgcctcaatgtcagctttcttgtaccacgcatgcgtcgtgaatttggaggctgtgccggcaacattgcgtacaatctgcatctgttgggtggtgctccgatccctatgggaacggtgggccaagatttcggtccgtatcgcgagcacttcgaaactctgggcattgacttatcccgcgtcaagatcatcgatgatctgagtacaccgcaggccttcattaccaccgaccatgatcataaccagattacggcgtttcatccaggcgcaatgatgcgttcgtacgaaaatcacgttcgtgatgtgccgggtgttaccttgggcctcgtaggtcctgatggacgcgagggcatgatccaaaatgccgaagaatttgctgctggtggcattccgttcatttttgacccaggtcaggcactgccgctgttcaacggccccgaactgcgcgagtttatcgaacaggcggactatgtggtggtcaacgattacgaaagcaatcttcttcaagaacgtactggctggaacgagcaggacattgtttcacgcgtgcaggcgtatatcaccacgcaaggttcgaaaggagccctggtacatacaccggagaagacctacgatattccgccggcacacgaacgtcgtgtcgttgatccaactggttgcggcgacgcgtttcgcgccggcctgatctatggtattcagcataattatgattggttgaccattggccgcatgggaaacttaatgggtgcgctgaaagtggcgcaccctggcacgcaaaatcagcgtttcgattttgccgaattcaacgaccagttcaaacaagattttggctacgcgctc

SEQ ID NO: 536 - protein, 321 aa, synthetic construct
  REGION 1..321: note = Variant of adenosine kinase
MHHHHHHGGSGMSALICGSLAYDTIMVFPDQFKNHILPDRVHRLNVSFLVPRMRREFGGCAGNIAYNLHLLGGAPIPMGTVGQDFGPYREHFETLGIDLSRVKIIDDLSTPQAFITTDHDHNQITAFHPGAMMRSYENHVRDVPGVTLGLVGPDGREGMIQNAEEFAAGGIPFIFDPGQALPLFNGPELREFIEQADYVVVNDYESNLLQERTGWNEQDIVSRVQAYITTQGSKGALVHTPEKTYDIPPAHERRVVDPTGCGDAFRAGLIYGIQHNYDWLTIGRMGNLMGALKVAHPGTQNQRFDFAEFNDQFKQDFGYAL

SEQ ID NO: 537 - DNA, 963 bp, synthetic construct
  misc_feature 1..963: note = Variant of adenosine kinase
  source 1..963: mol_type = other DNA
atgcaccatcatcaccatcacgggggctccggcatgagtgcactgatttgcggttctttagcgtatgataccatcatggtgtttccggaccagttcaagaaccatattctgcccgatcgtgttcaccgcctcaatgtcagctttcttgtaccacgcatgcgtcgtgaatttggaggctgtgccggcaacattgcgtacaatctgcatctgttgggtggtgctccgatccctatgggaacggtgggccaagatttcggtccgtatcgcgagcacttcgaaactctgggcattgacttatcccgcgtcaagatcatcgatgatctgagtacaccgcaggccttcattaccaccgaccatgatcataaccagattacggcgtttcatccaggcgcaatgatgcgttcgtacgaaaatcacgttcgtgatgtgcagggtgttaccttgggcctcgtaggtcctgatggacgcgagggcatgatccaaaatgccgaagaatttgctgctggtggcattccgttcatttttgacccaggtcaggcactgccgctgttcaacggccccgaactgcgcgagtttatcgaacaggcggactatgtggtggtcaacgattacgaaagcaatcttcttcaagaacgtactggctggaacgagcaggacattgtttcacgcgtgcaggcgtatatcaccacgcaaggttcgaaaggagccctggtacatacaccggagaagacctacgatattccgccggcacacgaacgtcgttgggttgatccaactggttgcggcgacgcgtttcgcgccggcctgatctatggtattcagcataattatgattggttgaccattggccgcatgggaaacttaatgggtgcgctgaaagtggaacaccctggcacgcaaaatcagcgtttcgattttgccgaattcaacgaccagttcaaacaagattttggctacgcgctc

SEQ ID NO: 538 - protein, 321 aa, synthetic construct
  REGION 1..321: note = Variant of adenosine kinase
MHHHHHHGGSGMSALICGSLAYDTIMVFPDQFKNHILPDRVHRLNVSFLVPRMRREFGGCAGNIAYNLHLLGGAPIPMGTVGQDFGPYREHFETLGIDLSRVKIIDDLSTPQAFITTDHDHNQITAFHPGAMMRSYENHVRDVQGVTLGLVGPDGREGMIQNAEEFAAGGIPFIFDPGQALPLFNGPELREFIEQADYVVVNDYESNLLQERTGWNEQDIVSRVQAYITTQGSKGALVHTPEKTYDIPPAHERRWVDPTGCGDAFRAGLIYGIQHNYDWLTIGRMGNLMGALKVEHPGTQNQRFDFAEFNDQFKQDFGYAL

SEQ ID NO: 539 - DNA, 963 bp, synthetic construct
  misc_feature 1..963: note = Variant of adenosine kinase
  source 1..963: mol_type = other DNA
atgcaccatcatcaccatcacgggggctccggcatgagtgcactgatttgcggttctttagcgtatgataccatcatggtgtttccggaccagttcaagaaccatattctgcccgatcgtgttcaccgcctcaatgtcagctttcttgtaccacgcatgcgtcgtgaatttggaggctgtgccggcaacattgcgtacaatctgcatctgttgggtggtgctccgatccctatgggaacggtgggccaagatttcggtccgtatcgcgagcacttcgaaactctgggcattgacttatcccgcgtcaagatcatcgatgatctgagtacaccgcaggccttcattaccaccgaccaggatcataaccagattacggcgtttcatccaggcgcaatgatgcgttcgtacgaaaatcacgttcgtgatgtgccgggtgttaccttgggcctcgtaggtcctgatggacgcgagggcatgatccaaaatgccgaagaatttgctgctggtggcattccgttcatttttgacccaggtcaggcactgccgctgttcaacggccccgaactgcgcgagtttatcgaacaggcggactatgtggtggtcaacgattacgaaagcaatcttcttcaagaacgtactggctggaacgagcaggacattgtttcacgcgtgcaggcgtatatcaccacgcaaggttcgaaaggagccctggtacatacaccggagaagacctacgatattccgccggcacacgaacgtcgtgtcgttgatccaactggttgcggcgacgcgtttcgcgccggcctgatctatggtattcagcataattatgattggttgaccattggccgcatgggaaacttaatgggtgcgctgaaagtggaacaccctggcacgcaaaatcagcgtttcgattttgccgaattcaacgaccagttcaaacaagattttggctacgcgctc

SEQ ID NO: 540 - protein, 321 aa, synthetic construct
  REGION 1..321: note = Variant of adenosine kinase
MHHHHHHGGSGMSALICGSLAYDTIMVFPDQFKNHILPDRVHRLNVSFLVPRMRREFGGCAGNIAYNLHLLGGAPIPMGTVGQDFGPYREHFETLGIDLSRVKIIDDLSTPQAFITTDQDHNQITAFHPGAMMRSYENHVRDVPGVTLGLVGPDGREGMIQNAEEFAAGGIPFIFDPGQALPLFNGPELREFIEQADYVVVNDYESNLLQERTGWNEQDIVSRVQAYITTQGSKGALVHTPEKTYDIPPAHERRVVDPTGCGDAFRAGLIYGIQHNYDWLTIGRMGNLMGALKVEHPGTQNQRFDFAEFNDQFKQDFGYAL

SEQ ID NO: 541 - DNA, 963 bp, synthetic construct
  misc_feature 1..963: note = Variant of adenosine kinase
  source 1..963: mol_type = other DNA
atgcaccatcatcaccatcacgggggctccggcatgagtgcactgatttgcggttctttagcgtatgataccatcatggtgtttccggaccagttcaagaaccatattctgcccgatcgtgttcaccgcctcaatgtcagctttcttgtaccacgcatgcgtcgtgaatttggaggctgtgccggcaacattgcgtacaatctgcatctgttgggtggtgctccgatccctatgggaacggtgggccaagatttcggtccgtatcgcgagcacttcgaaactctgggcattgacttatcccgcgtcaagatcatcgatgatctgagtacaccgcaggccttcattaccaccgaccatgatcataaccagattacggcgtttcatccaggcgcaatgatgcgttcgtacgaaaatcacgttcgtgatgtgccgggtgttaccttgggcctcgtaggtcctgatggacgcgagggcatgatccaaaatgccgaagaatttgctgctggtggcattccgttcatttttgacccaggtcaggcactgccgctgttcaacggccccgaactgcgcgagtttatcgaacaggcggactatgtggtggtcaacgattacgaaagcaatcttcttcaagaacgtactggctggaacgagcaggacattgtttcacgcgtgcaggcgtatatcaccacgcaaggttcgaaaggagccctggtacatacaccggagaagacctacgatattccgccggcacacgaacgtcgtgtcgttgatccaactggttgcggcgacgcgtttcgcgccggcctgatctatggtattcagcataattatgattggttgaccattggccgcatgggaaacttaatgggtggtctgaaagtggaacaccctggcacgcaaaatcagcgtttcgattttgccgaattcaacgaccagttcaaacaagattttggctacgcgctc

SEQ ID NO: 542 - protein, 321 aa, synthetic construct
  REGION 1..321: note = Variant of adenosine kinase
MHHHHHHGGSGMSALICGSLAYDTIMVFPDQFKNHILPDRVHRLNVSFLVPRMRREFGGCAGNIAYNLHLLGGAPIPMGTVGQDFGPYREHFETLGIDLSRVKIIDDLSTPQAFITTDHDHNQITAFHPGAMMRSYENHVRDVPGVTLGLVGPDGREGMIQNAEEFAAGGIPFIFDPGQALPLFNGPELREFIEQADYVVVNDYESNLLQERTGWNEQDIVSRVQAYITTQGSKGALVHTPEKTYDIPPAHERRVVDPTGCGDAFRAGLIYGIQHNYDWLTIGRMGNLMGGLKVEHPGTQNQRFDFAEFNDQFKQDFGYAL

SEQ ID NO: 543 - DNA, 963 bp, synthetic construct
  misc_feature 1..963: note = Variant of adenosine kinase
  source 1..963: mol_type = other DNA
atgcaccatcatcaccatcacgggggctccggcatgagtgcactgatttgcggttctttagcgtatgataccatcatggtgtttccggaccagttcaagaaccatattctgcccgatcgtgttcaccgcctcaatgtcagctttcttgtaccacgcatgcgtcgtgaatttggaggctgtgccggcaacattgcgtacaatctgcatctgttgggtggtgctccgatccctatgggaacggtgggccaagatttcggtccgtatcgcgagcacttcgaaactctgggcattgacttatcccgcgtcaagatcatcgatgatctgagtacaccgcaggccttcattaccaccgaccatgatcataaccagattacggcgtttcatccaggcgcaatgatgcgttcgtacgaaaatcacgttcgtgatgtgccgggtgttaccttgggcctcgtaggtcctgatggacgcgagggcatgatccaaaatgccgaagaatttgctgctggtggcattccgttcatttttgacccaggtcaggcactgccgctgttcaacggccccgaactgcgcgagtttatcgaacaggcggactatgtggtggtcaacgattacgaaagcaatcttcttcaagaacgtactggctggaacgagcaggacattgtttcacgcgtgcaggcgtatatcaccacgcaaggttcgaaaggagccctggtacatacaccggagaagacctacgatattccgccgacgcacgaacgtcgtgtcgttgatccaactggttgcggcgacgcgtttcgcgccggcctgatctatggtattcagcataattatgattggttgaccattggccgcatgggaaacttaatgggtgcgctgaaagtggaacaccctggcacgcaaaatcagcgtttcgattttgccgaattcaacgaccagttcaaacaagattttggctacgcgctc

SEQ ID NO: 544 - protein, 321 aa, synthetic construct
  REGION 1..321: note = Variant of adenosine kinase
MHHHHHHGGSGMSALICGSLAYDTIMVFPDQFKNHILPDRVHRLNVSFLVPRMRREFGGCAGNIAYNLHLLGGAPIPMGTVGQDFGPYREHFETLGIDLSRVKIIDDLSTPQAFITTDHDHNQITAFHPGAMMRSYENHVRDVPGVTLGLVGPDGREGMIQNAEEFAAGGIPFIFDPGQALPLFNGPELREFIEQADYVVVNDYESNLLQERTGWNEQDIVSRVQAYITTQGSKGALVHTPEKTYDIPPTHERRVVDPTGCGDAFRAGLIYGIQHNYDWLTIGRMGNLMGALKVEHPGTQNQRFDFAEFNDQFKQDFGYAL

SEQ ID NO: 545 - DNA, 963 bp, synthetic construct
  misc_feature 1..963: note = Variant of adenosine kinase
  source 1..963: mol_type = other DNA
atgcaccatcatcaccatcacgggggctccggcatgagtgcactgatttgcggttctttagcgtatgataccatcatggtgtttccggaccagttcaagaaccatattctgcccgatcgtgttcaccgcctcaatgtcagctttcttgtaccacgcatgcgtcgtgaatttggaggctgtgccggcaacattgcgtacaatctgcatctgttgggtggtgctccgatccctatgggaacggtgggccaagatttcggtccgtatcgcgagcacttcgaaactctgggcattgacttatcccgcgtcaagatcatcgatgatctgagtacaccgcaggccttcattaccaccgaccatgatcataaccagattacggcgtttcatccaggcgcaatgatgcgttcgtacgaaaatcacgttcgtgatgtgccgggtgttaccttgggcctcgtaggtcctgatggacgcgagggcatgatccaaaatgccgaagaatttgctgctggtggcattccgttcatttttgacccaggtcaggcaatgccgctgttcaacggccccgaactgcgcgagtttatcgaacaggcggactatgtggtggtcaacgattacgaaagcaatcttcttcaagaacgtactggctggaacgagcaggacattgtttcacgcgtgcaggcgtatatcaccacgcaaggttcgaaaggagccctggtacatacaccggagaagacctacgatattccgccggcacacgaacgtcgtgtcgttgatccaactggttgcggcgacgcgtttcgcgccggcctgatctatggtattcagcataattatgattggttgaccattggccgcatgggaaacttaatgggtgcgctgaaagtggaacaccctggcacgcaaaatcagcgtttcgattttgccgaattcaacgaccagttcaaacaagattttggctacgcgctc

SEQ ID NO: 546 - protein, 321 aa, synthetic construct
  REGION 1..321: note = Variant of adenosine kinase
MHHHHHHGGSGMSALICGSLAYDTIMVFPDQFKNHILPDRVHRLNVSFLVPRMRREFGGCAGNIAYNLHLLGGAPIPMGTVGQDFGPYREHFETLGIDLSRVKIIDDLSTPQAFITTDHDHNQITAFHPGAMMRSYENHVRDVPGVTLGLVGPDGREGMIQNAEEFAAGGIPFIFDPGQAMPLFNGPELREFIEQADYVVVNDYESNLLQERTGWNEQDIVSRVQAYITTQGSKGALVHTPEKTYDIPPAHERRVVDPTGCGDAFRAGLIYGIQHNYDWLTIGRMGNLMGALKVEHPGTQNQRFDFAEFNDQFKQDFGYAL

SEQ ID NO: 547 - DNA, 963 bp, synthetic construct
  misc_feature 1..963: note = Variant of adenosine kinase
  source 1..963: mol_type = other DNA
atgcaccatcatcaccatcacgggggctccggcatgagtgcactgatttgcggttctttagcgtatgataccatcatggtgtttccggaccagttcaagaaccatattctgcccgatcgtgttcaccgcctcaatgtcagctttcttgtaccacgcatgcgtcgtgaatttggaggctgtgccggcaacattgcgtacaatctgcatctgttgggtggtgctccgatccctatgggaacggtgggccaagatttcggtccgtatcgcgagcacttcgaaactctgggcattgacttatcccgcgtcaagatcatcgatgatctgagtacaccgcaggccttcattaccaccgaccatgatcataaccagattacggcgtttcatccaggcgcaatgatgcgttcgtacgaaaatcacgttcgtgatgtgccgggtgttaccttgggcctcgtaggtcctgatggacgcgagggcatgatccaaaatgccgaagaatttgctgctggtggcattccgttcatttttgacccaggtcaggcactgccgctgttcaacggccccgaactgcgcgagtttatcgaacaggcggactatgtggtggtcaacgattacgaaagcaatcttcttcaagaacgtactggctggaacgagcaggacattgtttcacgcgtgcaggcgtatatcaccacgcaaggttcgaaaggagccctggtacatacaccggagaagacctacgatattccgccggcacacgaacgtcgtgtcgttgatccaactggttgcggcgacgcgtttcgcgccggcctgatctatggtattcagcataattatgattggttgaccattggccgcatgggaagtttaatgggtgcgctgaaagtggaacaccctggcacgcaaaatcagcgtttcgattttgccgaattcaacgaccagttcaaacaagattttggctacgcgctc

SEQ ID NO: 548 - protein, 321 aa, synthetic construct
  REGION 1..321: note = Variant of adenosine kinase
MHHHHHHGGSGMSALICGSLAYDTIMVFPDQFKNHILPDRVHRLNVSFLVPRMRREFGGCAGNIAYNLHLLGGAPIPMGTVGQDFGPYREHFETLGIDLSRVKIIDDLSTPQAFITTDHDHNQITAFHPGAMMRSYENHVRDVPGVTLGLVGPDGREGMIQNAEEFAAGGIPFIFDPGQALPLFNGPELREFIEQADYVVVNDYESNLLQERTGWNEQDIVSRVQAYITTQGSKGALVHTPEKTYDIPPAHERRVVDPTGCGDAFRAGLIYGIQHNYDWLTIGRMGSLMGALKVEHPGTQNQRFDFAEFNDQFKQDFGYAL

SEQ ID NO: 549 - DNA, 963 bp, synthetic construct
  misc_feature 1..963: note = Variant of adenosine kinase
  source 1..963: mol_type = other DNA
atgcaccatcatcaccatcacgggggctccggcatgagtgcactgatttgcggttctttagcgtatgataccatcatggtgtttccggaccagttcaagaaccatattctgcccgatcgtgttcaccgcctcaatgtcagctttcttgtaccacgcatgcgtcgtgaatttggaggctgtgccggcaacattgcgtacaatctgcatctgttgggtggtgctccgatccctatgggaacggtgggccaagatttcggtccgtatcgcgagcacttcgaaactctgggcattgacttatcccgcgtcaagatcatcgatgatctgagtacaccgcaggccttcattaccaccgaccgtgatcataaccagattacggcgtttcatccaggcgcaatgatgcgttcgtacgaaaatcacgttcgtgatgtgccgggtgttaccttgggcctcgtaggtcctgatggacgcgagggcatgatccaaaatgccgaagaatttgctgctggtggcattccgttcatttttgacccaggtcaggcactgccgctgttcaacggccccgaactgcgcgagtttatcgaacaggcggactatgtggtggtcaacgattacgaaagcaatcttcttcaagaacgtactggctggaacgagcaggacattgtttcacgcgtgcaggcgtatatcaccacgcaaggttcgaaaggagccctggtacatacaccggagaagacctacgatattccgccggcacacgaacgtcgtgtcgttgatccaactggttgcggcgacgcgtttcgcgccggcctgatctatggtattcagcataattatgattggttgaccattggccgcatgggaaacttaatgggtgcgctgaaagtggaacaccctggcacgcaaaatcagcgtttcgattttgccgaattcaacgaccagttcaaacaagattttggctacgcgctc

SEQ ID NO: 550 - protein, 321 aa, synthetic construct
  REGION 1..321: note = Variant of adenosine kinase
MHHHHHHGGSGMSALICGSLAYDTIMVFPDQFKNHILPDRVHRLNVSFLVPRMRREFGGCAGNIAYNLHLLGGAPIPMGTVGQDFGPYREHFETLGIDLSRVKIIDDLSTPQAFITTDRDHNQITAFHPGAMMRSYENHVRDVPGVTLGLVGPDGREGMIQNAEEFAAGGIPFIFDPGQALPLFNGPELREFIEQADYVVVNDYESNLLQERTGWNEQDIVSRVQAYITTQGSKGALVHTPEKTYDIPPAHERRVVDPTGCGDAFRAGLIYGIQHNYDWLTIGRMGNLMGALKVEHPGTQNQRFDFAEFNDQFKQDFGYAL

SEQ ID NO: 551 - DNA, 963 bp, synthetic construct
  misc_feature 1..963: note = Variant of adenosine kinase
  source 1..963: mol_type = other DNA
atgcaccatcatcaccatcacgggggctccggcatgagtgcactgatttgcggttctttagcgtatgataccatcatggtgtttccggaccagttcaagaaccatattctgcccgatcgtgttcaccgcctcaatgtcagctttcttgtaccacgcatgcgtcgtgaatttggaggctgtgccggcaacattgcgtacaatctgcatctgttgggtggtgctccgatccctatgggaacggtgggccaagatttcggtccgtatcgcgagcacttcgaaactctgggcattgacttatcccgcgtcaagatcatcgatgatctgagtacaccgcaggccttcattaccaccgaccatgatcataaccagattacggcgtttcatccaggcgcaatgatgcgttcgtacgaaaatcacgttcgtgatgtgccgggtgttaccttgggcctcgtaggtcctgatggacgcgagggcatgatccaaaatgccgaagaatttgctgctggtggcattccgttcatttttgacccaggtcaggcactgccgctgttcaacggccccgaactgcgcgagtttatcgaacaggcggactatgtggtggtcaacgattacgaaagcaatcttcttcaagaacgtactggctggaacgagcaggacattgtttcacgcgtgcaggcgtatatcaccacgcaaggttcgaaaggagccctggtacatacaccggagaagacctacgatattccgccggcacacgaacgtcgtgtcgttgatccaactggttgcggcgacgcgtttcgcgccggcctgatctatggtattcagcataattatgattggttgaccattggccgcatgggaaacttaatgggtgcgctgaaagtggaacaccctggcacgcaaaatcagcgtttcgattttgccgaattcaacgaccagttcaaacaagattatggctacgcgctc

SEQ ID NO: 552 - protein, 321 aa, synthetic construct
  REGION 1..321: note = Variant of adenosine kinase
MHHHHHHGGSGMSALICGSLAYDTIMVFPDQFKNHILPDRVHRLNVSFLVPRMRREFGGCAGNIAYNLHLLGGAPIPMGTVGQDFGPYREHFETLGIDLSRVKIIDDLSTPQAFITTDHDHNQITAFHPGAMMRSYENHVRDVPGVTLGLVGPDGREGMIQNAEEFAAGGIPFIFDPGQALPLFNGPELREFIEQADYVVVNDYESNLLQERTGWNEQDIVSRVQAYITTQGSKGALVHTPEKTYDIPPAHERRVVDPTGCGDAFRAGLIYGIQHNYDWLTIGRMGNLMGALKVEHPGTQNQRFDFAEFNDQFKQDYGYAL

SEQ ID NO: 553 - DNA, 963 bp, synthetic construct
  misc_feature 1..963: note = Variant of adenosine kinase
  source 1..963: mol_type = other DNA
atgcaccatcatcaccatcacgggggctccggcatgagtgcactgatttgcggttctttagcgtatgataccatcatggtgtttccggaccagttcaagaaccatattctgcccgatcgtgttcaccgcctcaatgtcagctttcttgtaccacgcatgcgtcgtgaatttggaggctgtgccggcaacattgcgtacaatctgcatctgttgggtggtgctccgatccctatgggaacggtgggccaagatttcggtccgtatcgcgagcacttcgaaactctgggcattgacttatcccgcgtcaagatcatcgatgatctgagtacaccgcaggccttcattaccaccgacggggatcataaccagattacggcgtttcatccaggcgcaatgatgcgttcgtacgaaaatcacgttcgtgatgtgccgggtgttaccttgggcctcgtaggtcctgatggacgcgagggcatgatccaaaatgccgaagaatttgctgctggtggcattccgttcatttttgacccaggtcaggcactgccgctgttcaacggccccgaactgcgcgagtttatcgaacaggcggactatgtggtggtcaacgattacgaaagcaatcttcttcaagaacgtactggctggaacgagcaggacattgtttcacgcgtgcaggcgtatatcaccacgcaaggttcgaaaggagccctggtacatacaccggagaagacctacgatattccgccggcacacgaacgtcgtgtcgttgatccaactggttgcggcgacgcgtttcgcgccggcctgatctatggtattcagcataattatgattggttgaccattggccgcatgggaaacttaatgggtgcgctgaaagtggaacaccctggcacgcaaaatcagcgtttcgattttgccgaattcaacgaccagttcaaacaagattttggctacgcgctc

SEQ ID NO: 554 - protein, 321 aa, synthetic construct
  REGION 1..321: note = Variant of adenosine kinase
MHHHHHHGGSGMSALICGSLAYDTIMVFPDQFKNHILPDRVHRLNVSFLVPRMRREFGGCAGNIAYNLHLLGGAPIPMGTVGQDFGPYREHFETLGIDLSRVKIIDDLSTPQAFITTDGDHNQITAFHPGAMMRSYENHVRDVPGVTLGLVGPDGREGMIQNAEEFAAGGIPFIFDPGQALPLFNGPELREFIEQADYVVVNDYESNLLQERTGWNEQDIVSRVQAYITTQGSKGALVHTPEKTYDIPPAHERRVVDPTGCGDAFRAGLIYGIQHNYDWLTIGRMGNLMGALKVEHPGTQNQRFDFAEFNDQFKQDFGYAL

SEQ ID NO: 555 - DNA, 963 bp, synthetic construct
  misc_feature 1..963: note = Variant of adenosine kinase
  source 1..963: mol_type = other DNA
atgcaccatcatcaccatcacgggggctccggcatgagtgcactgatttgcggttctttagcgtatgataccatcatggtgtttccggaccagttcaagaaccatattctgcccgatcgtgttcaccgcctcaatgtcagctttcttgtaccacgcatgcgtcgtgaatttggaggctgtgccggcaacattgcgtacaatctgcatctgttgggtggtgctccgatccctatgggaacggtgggccaagatttcggtccgtatcgcgagcacttcgaaactctgggcattgacttatcccgcgtcaagatcatcgatgatctgagtacaccgcaggccttcattaccaccgaccatgatcataaccagattacggcgtttcatccaggcgcaatgatgcgttcgtacgaaaatcacgttcgtgatgtgccgggtgttaccttgggcctcgtaggtcctgatggacgcgagggcatgatccaaaatgccgaagaatttgctgctggtggcattccgttcatttttgacccaggtcaggcactgccgctgttcaacggccccgaactgcgcgagtttatcgaacaggcggactatgtggtggtcaacgattacgaaagcaatcttcttcaagaacgtactggctggaacgagcaggacattgtttcacgcgtgcaggcgtatatcaccacgcaaggttcgaaaggagccctggtacatacaccggagaagacctacgatattccgccgatgcacgaacgtcgtgtcgttgatccaactggttgcggcgacgcgtttcgcgccggcctgatctatggtattcagcataattatgattggttgaccattggccgcatgggaaacttaatgggtgcgctgaaagtggaacaccctggcacgcaaaatcagcgtttcgattttgccgaattcaacgaccagttcaaacaagattttggctacgcgctc

SEQ ID NO: 556 - protein, 321 aa, synthetic construct
  REGION 1..321: note = Variant of adenosine kinase
MHHHHHHGGSGMSALICGSLAYDTIMVFPDQFKNHILPDRVHRLNVSFLVPRMRREFGGCAGNIAYNLHLLGGAPIPMGTVGQDFGPYREHFETLGIDLSRVKIIDDLSTPQAFITTDHDHNQITAFHPGAMMRSYENHVRDVPGVTLGLVGPDGREGMIQNAEEFAAGGIPFIFDPGQALPLFNGPELREFIEQADYVVVNDYESNLLQERTGWNEQDIVSRVQAYITTQGSKGALVHTPEKTYDIPPMHERRVVDPTGCGDAFRAGLIYGIQHNYDWLTIGRMGNLMGALKVEHPGTQNQRFDFAEFNDQFKQDFGYAL

SEQ ID NO: 557 - DNA, 963 bp, synthetic construct
  misc_feature 1..963: note = Variant of adenosine kinase
  source 1..963: mol_type = other DNA
atgcaccatcatcaccatcacgggggctccggcatgagtgcactgatttgcggttctttagcgtatgataccatcatggtgtttccggaccagttcaagaaccatattctgcccgatcgtgttcaccgcctcaatgtcagctttcttgtaccacgcatgcgtcgtgaatttggaggctgtgccggcaacattgcgtacaatctgcatctgttgggtggtgctccgatccctatgggaacggtgggccaagatttcggtccgtatcgcgagcacttcgaaactctgggcattgacttatcccgcgtcaagatcatcgatgatctgagtacaccgcaggccttcattaccaccgaccatgatcataaccagattacggcgtttcatccaggcgcaatgatgcgttcgtacgaaaatcacgttcgtgatgtgccgggtgttaccttgggcctcgtaggtcctgatggacgcgagggcatgatccaaaatgccgaagaatttgctgctggtggcattccgttcatttttgacccaggtcaggcactgccgctgttcaacggccccgaactgcgcgagtttatcgaacaggcggactatgtggtggtcaacgattacgaaagcaatcttcttcaagaacgtactggctggaacgagcaggacattgtttcacgcgtgcaggcgtatatcaccacgcaaggttcgaaaggagccctggtacatacaccggagaagacctacgatattccgggggcacacgaacgtcgtgtcgttgatccaactggttgcggcgacgcgtttcgcgccggcctgatctatggtattcagcataattatgattggttgaccattggccgcatgggaaacttaatgggtgcgctgaaagtggaacaccctggcacgcaaaatcagcgtttcgattttgccgaattcaacgaccagttcaaacaagattttggctacgcgctc

SEQ ID NO: 558 - protein, 321 aa, synthetic construct
  REGION 1..321: note = Variant of adenosine kinase
MHHHHHHGGSGMSALICGSLAYDTIMVFPDQFKNHILPDRVHRLNVSFLVPRMRREFGGCAGNIAYNLHLLGGAPIPMGTVGQDFGPYREHFETLGIDLSRVKIIDDLSTPQAFITTDHDHNQITAFHPGAMMRSYENHVRDVPGVTLGLVGPDGREGMIQNAEEFAAGGIPFIFDPGQALPLFNGPELREFIEQADYVVVNDYESNLLQERTGWNEQDIVSRVQAYITTQGSKGALVHTPEKTYDIPGAHERRVVDPTGCGDAFRAGLIYGIQHNYDWLTIGRMGNLMGALKVEHPGTQNQRFDFAEFNDQFKQDFGYAL

SEQ ID NO: 559 - DNA, 963 bp, synthetic construct
  misc_feature 1..963: note = Variant of adenosine kinase
  source 1..963: mol_type = other DNA
atgcaccatcatcaccatcacgggggctccggcatgagtgcactgatttgcggttctttagcgtatgataccatcatggtgtttccggaccagttcaagaaccatattctgcccgatcgtgttcaccgcctcaatgtcagctttcttgtaccacgcatgcgtcgtgaatttggaggctgtgccggcaacattgcgtacaatctgcatctgttgggtggtgctccgatccctatgggaacggtgggccaagatttcggtccgtatcgcgagcacttcgaaactctgggcattgacttatcccgcgtcaagatcatcgatgatctgagtacaccgcaggccttcattaccaccgaccatgatcataaccagattacggcgtttcatccaggcgcaatgatgcgttcgtacgaaaatcacgttcgtgatgtgccgggtgttaccttgggcctcgtaggtcctgatggacgcgagggcatgatccaaaatgccgaagaatttgctgctggtggcattccgttcatttttgacccaggtcaggcactgccgctgttcaacggccccgaactgcgcgagtttatcgaacaggcggactatgtggtggtcaacgattacgaaagcaatcttcttcaagaacgtactggctggaacgagcaggacattgtttcacgcgtgcaggcgtatatcaccacgcaaggttcgaaaggagccctggtacatacaccggagaagacctacgatattccgattgcacacgaacgtcgtgtcgttgatccaactggttgcggcgacgcgtttcgcgccggcctgatctatggtattcagcataattatgattggttgaccattggccgcatgggaaacttaatgggtgcgctgaaagtggaacaccctggcacgcaaaatcagcgtttcgattttgccgaattcaacgaccagttcaaacaagattttggctacgcgctc

SEQ ID NO: 560 - protein, 321 aa, synthetic construct
  REGION 1..321: note = Variant of adenosine kinase
MHHHHHHGGSGMSALICGSLAYDTIMVFPDQFKNHILPDRVHRLNVSFLVPRMRREFGGCAGNIAYNLHLLGGAPIPMGTVGQDFGPYREHFETLGIDLSRVKIIDDLSTPQAFITTDHDHNQITAFHPGAMMRSYENHVRDVPGVTLGLVGPDGREGMIQNAEEFAAGGIPFIFDPGQALPLFNGPELREFIEQADYVVVNDYESNLLQERTGWNEQDIVSRVQAYITTQGSKGALVHTPEKTYDIPIAHERRVVDPTGCGDAFRAGLIYGIQHNYDWLTIGRMGNLMGALKVEHPGTQNQRFDFAEFNDQFKQDFGYAL

SEQ ID NO: 561 - DNA, 963 bp, synthetic construct
  misc_feature 1..963: note = Variant of adenosine kinase
  source 1..963: mol_type = other DNA
atgcaccatcatcaccatcacgggggctccggcatgagtgcactgatttgcggttctgttgcgtatgataccatcatggtgtttccggaccagttcaagaaccatattctgcccgatcgtgttcaccgcctcaatgtcagctttcttgtaccacgcatgcgtcgtgaatttggaggctgtgccggcaacattgcgtacaatctgcatctgttgggtggtgctccgatccctatgggaacggtgggccaagatttcggtccgtatcgcgagcacttcgaaactctgggcattgacttatcccgcgtcaagatcatcgatgatctgagtacaccgcaggccttcattaccaccgaccatgatcataaccagattacggcgtttcatccaggcgcaatgatgcgttcgtacgaaaatcacgttcgtgatgtgccgggtgttaccttgggcctcgtaggtcctgatggacgcgagggcatgatccaaaatgccgaagaatttgctgctggtggcattccgttcatttttgacccaggtcaggcactgccgctgttcaacggccccgaactgcgcgagtttatcgaacaggcggactatgtggtggtcaacgattacgaaagcaatcttcttcaagaacgtactggctggaacgagcaggacattgtttcacgcgtgcaggcgtatatcaccacgcaaggttcgaaaggagccctggtacatacaccggagaagacctacgatattccgccggcacacgaacgtcgtgtcgttgatccaactggttgcggcgacgcgtttcgcgccggcctgatctatggtattcagcataattatgattggttgaccattggccgcatgggaaacttaatgggtgcgctgaaagtggaacaccctggcacgcaaaatcagcgtttcgattttgccgaattcaacgaccagttcaaacaagattttggctacgcgctc

SEQ ID NO: 562 - protein, 321 aa, synthetic construct
  REGION 1..321: note = Variant of adenosine kinase
MHHHHHHGGSGMSALICGSVAYDTIMVFPDQFKNHILPDRVHRLNVSFLVPRMRREFGGCAGNIAYNLHLLGGAPIPMGTVGQDFGPYREHFETLGIDLSRVKIIDDLSTPQAFITTDHDHNQITAFHPGAMMRSYENHVRDVPGVTLGLVGPDGREGMIQNAEEFAAGGIPFIFDPGQALPLFNGPELREFIEQADYVVVNDYESNLLQERTGWNEQDIVSRVQAYITTQGSKGALVHTPEKTYDIPPAHERRVVDPTGCGDAFRAGLIYGIQHNYDWLTIGRMGNLMGALKVEHPGTQNQRFDFAEFNDQFKQDFGYAL

SEQ ID NO: 563 - DNA, 963 bp, synthetic construct
  misc_feature 1..963: note = Variant of adenosine kinase
  source 1..963: mol_type = other DNA
atgcaccatcatcaccatcacgggggctccggcatgagtgcactgatttgcggttctttagcgtatgataccatcatggtgtttccggaccagttcaagaaccatattctgcccgatcgtgttcaccgcctcaatgtcagctttcttgtaccacgcatgcgtcgtgaatttggaggctgtgccggcaacattgcgtacaatctgcatctgttgggtggtgctccgatccctatgggaacggtgggccaagatttcggtccgtatcgcgagcacttcgaaactctgggcattgacttatcccgcgtcaagatcatcgatgatctgagtacaccgcaggccttcattaccaccgaccatgatcataaccagattacggcgtttcatccaggcgcaatgatgcgttcgtacgaaaatcacgttcgtgatgtgccgggtgttaccttgggcctcgtaggtcctgatggacgcgagggcatgatccaaaatgccgaagaatttgctgctggtggcattccgttcatttttgacccaggtcaggcactgccgctgttcaacggccccgaactgcgcgagtttatcgaacaggcggactatgtggtggtcaacgattacgaaagcaatcttcttcaagaacgtactggctggaacgagcaggacattgtttcacgcgtgcaggcgtatatcaccacgcaaggttcgaaaggagccatggtacatacaccggagaagacctacgatattccgccggcacacgaacgtcgtgtcgttgatccaactggttgcggcgacgcgtttcgcgccggcctgatctatggtattcagcataattatgattggttgaccattggccgcatgggaaacttaatgggtgcgctgaaagtggaacaccctggcacgcaaaatcagcgtttcgattttgccgaattcaacgaccagttcaaacaagattttggctacgcgctc

SEQ ID NO: 564 - protein, 321 aa, synthetic construct
  REGION 1..321: note = Variant of adenosine kinase
MHHHHHHGGSGMSALICGSLAYDTIMVFPDQFKNHILPDRVHRLNVSFLVPRMRREFGGCAGNIAYNLHLLGGAPIPMGTVGQDFGPYREHFETLGIDLSRVKIIDDLSTPQAFITTDHDHNQITAFHPGAMMRSYENHVRDVPGVTLGLVGPDGREGMIQNAEEFAAGGIPFIFDPGQALPLFNGPELREFIEQADYVVVNDYESNLLQERTGWNEQDIVSRVQAYITTQGSKGAMVHTPEKTYDIPPAHERRVVDPTGCGDAFRAGLIYGIQHNYDWLTIGRMGNLMGALKVEHPGTQNQRFDFAEFNDQFKQDFGYAL

SEQ ID NO: 565 - DNA, 963 bp, synthetic construct
  misc_feature 1..963: note = Variant of adenosine kinase
  source 1..963: mol_type = other DNA
atgcaccatcatcaccatcacgggggctccggcatgagtgcactgatttgcggttctttagcgtatgataccatcatggtgtttccggaccagttcaagaaccatattctgcccgatcgtgttcaccgcctcaatgtcagctttcttgtaccacgcatgcgtcgtgaatttggaggctgtgccggcaacattgcgtacaatctgcatctgttgggtggtgctccgatccctatgggaacggtgggccaagatttcggtccgtatcgcgagcacttcgaaactctgggcattgacttatcccgcgtcaagatcatcgatgatctgagtacaccgcaggccttcattaccaccgaccatgatcataaccagattacggcgtttcatccaggcgcaatgatgcgttcgtacgaaaatcacgttcgtgatgtgccgggtgttaccttgggcctcgtaggtcctgatggacgcgagggcatgatccaaaatgccgaagaatttgctgctggtggcattccgttcatttttgacccaggtcaggcactgccgctgttcaacggccccgaactgcgcgagtttatcgaacaggcggactatgtggtggtcaacgattacgaaagcaatcttcttcaagaacgtactggctggaacgagcaggacattgtttcacgcgtgcaggcgtatatcaccacgcaaggtgcgaaaggagccctggtacatacaccggagaagacctacgatattccgccggcacacgaacgtcgtgtcgttgatccaactggttgcggcgacgcgtttcgcgccggcctgatctatggtattcagcataattatgattggttgaccattggccgcatgggaaacttaatgggtgcgctgaaagtggaacaccctggcacgcaaaatcagcgtttcgattttgccgaattcaacgaccagttcaaacaagattttggctacgcgctc

SEQ ID NO: 566 - protein, 321 aa, synthetic construct
  REGION 1..321: note = Variant of adenosine kinase
MHHHHHHGGSGMSALICGSLAYDTIMVFPDQFKNHILPDRVHRLNVSFLVPRMRREFGGCAGNIAYNLHLLGGAPIPMGTVGQDFGPYREHFETLGIDLSRVKIIDDLSTPQAFITTDHDHNQITAFHPGAMMRSYENHVRDVPGVTLGLVGPDGREGMIQNAEEFAAGGIPFIFDPGQALPLFNGPELREFIEQADYVVVNDYESNLLQERTGWNEQDIVSRVQAYITTQGAKGALVHTPEKTYDIPPAHERRVVDPTGCGDAFRAGLIYGIQHNYDWLTIGRMGNLMGALKVEHPGTQNQRFDFAEFNDQFKQDFGYAL

SEQ ID NO: 567 - DNA, 963 bp, synthetic construct
  misc_feature 1..963: note = Variant of adenosine kinase
  source 1..963: mol_type = other DNA
atgcaccatcatcaccatcacgggggctccggcatgagtgcactgatttgcggttctttagcgtatgataccatcatggtgtttccggaccagttcaagaaccatattctgcccgatcgtgttcaccgcctcaatgtcagctttcttgtaccacgcatgcgtcgtgaatttggaggctgtgccggcaacattgcgtacaatctgcatctgttgggtggtgctccgatccctatgggaacggtgggccaagatttcggtccgtatcgcgagcacttcgaaactctgggcattgacttatcccgcgtcaagatcatcgatgatctgagtacaccgcaggccttcattaccaccgaccatgatcataaccagattacggcgtttcatccaggcgcaatgatgcgttcgtacgaaaatcacgttcgtgatgtgccgggtgttaccttgggcctcgtaggtcctgatggacgcgagggcatgatccaaaatgccgaagaatttgctgctggtggcattccgttcatttttgacccaggtcaggcactgccgctgttcaacggccccgaactgcgcgagtttatcgaacaggcggactatgtggtggtcaacgattacgaaagcaatcttcttcaagaacgtactggctggaacgagcaggacattgtttcacgcgtgcaggcgtatatcaccacgcaaggttcgaaaggagccctggtacatacaccggagaagacctacgatattggtccggcacacgaacgtcgtgtcgttgatccaactggttgcggcgacgcgtttcgcgccggcctgatctatggtattcagcataattatgattggttgaccattggccgcatgggaaacttaatgggtgcgctgaaagtggaacaccctggcacgcaaaatcagcgtttcgattttgccgaattcaacgaccagttcaaacaagattttggctacgcgctc

SEQ ID NO: 568 - protein, 321 aa, synthetic construct
  REGION 1..321: note = Variant of adenosine kinase
MHHHHHHGGSGMSALICGSLAYDTIMVFPDQFKNHILPDRVHRLNVSFLVPRMRREFGGCAGNIAYNLHLLGGAPIPMGTVGQDFGPYREHFETLGIDLSRVKIIDDLSTPQAFITTDHDHNQITAFHPGAMMRSYENHVRDVPGVTLGLVGPDGREGMIQNAEEFAAGGIPFIFDPGQALPLFNGPELREFIEQADYVVVNDYESNLLQERTGWNEQDIVSRVQAYITTQGSKGALVHTPEKTYDIGPAHERRVVDPTGCGDAFRAGLIYGIQHNYDWLTIGRMGNLMGALKVEHPGTQNQRFDFAEFNDQFKQDFGYAL

SEQ ID NO: 569 - DNA, 963 bp, synthetic construct
  misc_feature 1..963: note = Variant of adenosine kinase
  source 1..963: mol_type = other DNA
atgcaccatcatcaccatcacgggggctccggcatgagtgcactgatttgcggttctttagcgtatgataccatcatggtgtttccggaccagttcaagaaccatattctgcccgatcgtgttcaccgcctcaatgtcagctttcttgtaccacgcatgcgtcgtgaatttggaggctgtgccggcaacattgcgtacaatctgcatctgttgggtggtgctccgatccctatgggaacggtgggccaagatttcggtccgtatcgcgagcacttcgaaactctgggcattgacttatcccgcgtcaagatcatcgatgatctgagtacaccgcaggccttcattaccaccgaccatgatcataaccagattacggcgtttcatccaggcgcaatgatgcgttcgtacgaaaatcacgttcgtgatgtgccgggtgttaccttgggcctcgtaggtcctgatggacgcgagggcatgatccaaaatgccgaagaatttgctgctggtggcattccgttcatttttgacccaggtcaggcactgccgctgttcaacggccccgaactgcgcgagtttatcgaacaggcggactatgtggtggtcaacgattacgaaagcaatcttcttcaagaacgtactggctggaacgagcaggacattgtttcacgcgtgcaggcgtatatcaccacggtgggttcgaaaggagccctggtacatacaccggagaagacctacgatattccgccggcacacgaacgtcgtgtcgttgatccaactggttgcggcgacgcgtttcgcgccggcctgatctatggtattcagcataattatgattggttgaccattggccgcatgggaaacttaatgggtgcgctgaaagtggaacaccctggcacgcaaaatcagcgtttcgattttgccgaattcaacgaccagttcaaacaagattttggctacgcgctc

SEQ ID NO: 570 - protein, 321 aa, synthetic construct
  REGION 1..321: note = Variant of adenosine kinase
MHHHHHHGGSGMSALICGSLAYDTIMVFPDQFKNHILPDRVHRLNVSFLVPRMRREFGGCAGNIAYNLHLLGGAPIPMGTVGQDFGPYREHFETLGIDLSRVKIIDDLSTPQAFITTDHDHNQITAFHPGAMMRSYENHVRDVPGVTLGLVGPDGREGMIQNAEEFAAGGIPFIFDPGQALPLFNGPELREFIEQADYVVVNDYESNLLQERTGWNEQDIVSRVQAYITTVGSKGALVHTPEKTYDIPPAHERRVVDPTGCGDAFRAGLIYGIQHNYDWLTIGRMGNLMGALKVEHPGTQNQRFDFAEFNDQFKQDFGYAL

SEQ ID NO: 571 - DNA, 963 bp, synthetic construct
  misc_feature 1..963: note = Variant of adenosine kinase
  source 1..963: mol_type = other DNA
atgcaccatcatcaccatcacgggggctccggcatgagtgcactgatttgcggttctttagcgtatgataccatcatggtgtttccggaccagttcaagaaccatattctgcccgatcgtgttcaccgcctcaatgtcagctttcttgtaccacgcatgcgtcgtgaatttggaggctgtgccggcaacattgcgtacaatctgcatctgttgggtggtgctccgatccctatgggaacggtgggccaagatttcggtccgtatcgcgagcacttcgaaactctgggcattgacttatcccgcgtcaagatcatcgatgatctgagtacaccgcaggccttcattaccaccgaccatgatcataaccagattacggcgtttcatccaggcgcaatgatgcgttcgtacgaaaatcacgttcgtgatgtgccgggtgttaccttgggcctcgtaggtcctgatggacgcgagggcatgatccaaaatgccgaagaatttgctgctggtggcattccgttcatttttgacccaggtcaggcactgccgctgttcaacggccccgaactgcgcgagtttatcgaacaggcggactatgtggtggtcaacgattacgaaagcaatcttcttcaagaacgtactggctggaacgagcaggacattgtttcacgcgtgcaggcgtatatcaccacgcaaggttcgaaaggagccctggtacatacaccggagaagacctacgatattccgccggcactggaacgtcgtgtcgttgatccaactggttgcggcgacgcgtttcgcgccggcctgatctatggtattcagcataattatgattggttgaccattggccgcatgggaaacttaatgggtgcgctgaaagtggaacaccctggcacgcaaaatcagcgtttcgattttgccgaattcaacgaccagttcaaacaagattttggctacgcgctc

SEQ ID NO: 572 - protein, 321 aa, synthetic construct
  REGION 1..321: note = Variant of adenosine kinase
MHHHHHHGGSGMSALICGSLAYDTIMVFPDQFKNHILPDRVHRLNVSFLVPRMRREFGGCAGNIAYNLHLLGGAPIPMGTVGQDFGPYREHFETLGIDLSRVKIIDDLSTPQAFITTDHDHNQITAFHPGAMMRSYENHVRDVPGVTLGLVGPDGREGMIQNAEEFAAGGIPFIFDPGQALPLFNGPELREFIEQADYVVVNDYESNLLQERTGWNEQDIVSRVQAYITTQGSKGALVHTPEKTYDIPPALERRVVDPTGCGDAFRAGLIYGIQHNYDWLTIGRMGNLMGALKVEHPGTQNQRFDFAEFNDQFKQDFGYAL

SEQ ID NO: 573 - DNA, 963 bp, synthetic construct
  misc_feature 1..963: note = Variant of adenosine kinase
  source 1..963: mol_type = other DNA
atgcaccatcatcaccatcacgggggctccggcatgagtgcactgatttgcggttctttagcgtatgataccatcatggtgtttccggaccagttcaagaaccatattctgcccgatcgtgttcaccgcctcaatgtcagctttcttgtaccacgcatgcgtcgtgaatttggaggctgtgccggcaacattgcgtacaatctgcatctgttgggtggtgctccgatccctatgggaacggtgggccaagatttcggtccgtatcgcgagcacttcgaaactctgggcattgacttatcccgcgtcaagatcatcgatgatctgagtacaccgcaggccttcattaccaccgaccatgatcataaccagattacggcgttttttccaggcgcaatgatgcgttcgtacgaaaatcacgttcgtgatgtgccgggtgttaccttgggcctcgtaggtcctgatggacgcgagggcatgatccaaaatgccgaagaatttgctgctggtggcattccgttcatttttgacccaggtcaggcactgccgctgttcaacggccccgaactgcgcgagtttatcgaacaggcggactatgtggtggtcaacgattacgaaagcaatcttcttcaagaacgtactggctggaacgagcaggacattgtttcacgcgtgcaggcgtatatcaccacgcaaggttcgaaaggagccctggtacatacaccggagaagacctacgatattccgccggcacacgaacgtcgtgtcgttgatccaactggttgcggcgacgcgtttcgcgccggcctgatctatggtattcagcataattatgattggttgaccattggccgcatgggaaacttaatgggtgcgctgaaagtggaacaccctggcacgcaaaatcagcgtttcgattttgccgaattcaacgaccagttcaaacaagattttggctacgcgctc

SEQ ID NO: 574 - protein, 321 aa, synthetic construct
  REGION 1..321: note = Variant of adenosine kinase
MHHHHHHGGSGMSALICGSLAYDTIMVFPDQFKNHILPDRVHRLNVSFLVPRMRREFGGCAGNIAYNLHLLGGAPIPMGTVGQDFGPYREHFETLGIDLSRVKIIDDLSTPQAFITTDHDHNQITAFFPGAMMRSYENHVRDVPGVTLGLVGPDGREGMIQNAEEFAAGGIPFIFDPGQALPLFNGPELREFIEQADYVVVNDYESNLLQERTGWNEQDIVSRVQAYITTQGSKGALVHTPEKTYDIPPAHERRVVDPTGCGDAFRAGLIYGIQHNYDWLTIGRMGNLMGALKVEHPGTQNQRFDFAEFNDQFKQDFGYAL

SEQ ID NO: 575 - DNA, 963 bp, synthetic construct
  misc_feature 1..963: note = Variant of adenosine kinase
  source 1..963: mol_type = other DNA
atgcaccatcatcaccatcacgggggctccggcatgagtgcactgatttgcggttctttagcgtatgataccatcatggtgtttccggaccagttcaagaaccatattctgcccgatcgtgttcaccgcctcaatgtcagctttcttgtaccacgcatgcgtcgtgaatttggaggctgtgccggcaacattgcgtacaatctgcatctgttgggtggtgctccgatccctatgggaacggtgggccaagatttcggtccgtatcgcgagcacttcgaaactctgggcattgacttatcccgcgtcaagatcatcgatgatctgagtacaccgcaggccttcattaccaccgaccatgatcataaccagattacggcgtttcatccaggcgcaatgatgcgttcgtacgaaaatcacgttcgtgatgtgccgggtgttaccttgggcctcgtaggtcctgatggacgcgagggcatgatccaaaatgccgaagaatttgctgctggtggcattccgttcatttttgacccaggtcaggcactgccgctgttcaacggccccgaactgcgcgagtttatcgaacaggcggactatgtggtggtcaacgattacgaaagcaatcttcttcaagaacgtactggctggaacgagcaggacattgtttcacgcgtgcaggcgtatatcaccacgcaaggttcgaaaggagccctggtacatacaccggagaagacctacgatattccgccggcacacgaacgtcgtgtcgttgatccaactggttgcggcgacgcgtttcgcgccggcctgatctatggtattcagcataattatgattggttgaccattggccgcatgggagcgttaatgggtgcgctgaaagtggaacaccctggcacgcaaaatcagcgtttcgattttgccgaattcaacgaccagttcaaacaagattttggctacgcgctc

SEQ ID NO: 576 - protein, 321 aa, synthetic construct
  REGION 1..321: note = Variant of adenosine kinase
MHHHHHHGGSGMSALICGSLAYDTIMVFPDQFKNHILPDRVHRLNVSFLVPRMRREFGGCAGNIAYNLHLLGGAPIPMGTVGQDFGPYREHFETLGIDLSRVKIIDDLSTPQAFITTDHDHNQITAFHPGAMMRSYENHVRDVPGVTLGLVGPDGREGMIQNAEEFAAGGIPFIFDPGQALPLFNGPELREFIEQADYVVVNDYESNLLQERTGWNEQDIVSRVQAYITTQGSKGALVHTPEKTYDIPPAHERRVVDPTGCGDAFRAGLIYGIQHNYDWLTIGRMGALMGALKVEHPGTQNQRFDFAEFNDQFKQDFGYAL

SEQ ID NO: 577 - DNA, 963 bp, synthetic construct
  misc_feature 1..963: note = Variant of adenosine kinase
  source 1..963: mol_type = other DNA
atgcaccatcatcaccatcacgggggctccggcatgagtgcactgatttgcggttctttagcgtatgataccatcatggtgtttccggaccagttcaagaaccatattctgcccgatcgtgttcaccgcctcaatgtcagctttcttgtaccacgcatgcgtcgtgaatttggaggctgtgccggcaacattgcgtacaatctgcatctgttgggtggtgctccgatccctatgggaacggtgggccaagatttcggtccgtatcgcgagcacttcgaaactctgggcattgacttatcccgcgtcaagatcatcgatgatctgagtacaccgcaggccttcattaccaccgaccatgatcataaccagattacggcgtttcatccaggcgcaatgatgcgttcgtacgaaaatcacgttcgtgatgtgccgggtgttaccttgggcctcgtaggtcctgatggacgcgagggcatgatccaaaatgccgaagaatttgctgctggtggcattccgttcatttttgacccaggtcaggcagttccgctgttcaacggccccgaactgcgcgagtttatcgaacaggcggactatgtggtggtcaacgattacgaaagcaatcttcttcaagaacgtactggctggaacgagcaggacattgtttcacgcgtgcaggcgtatatcaccacgcaaggttcgaaaggagccctggtacatacaccggagaagacctacgatattccgccggcacacgaacgtcgtgtcgttgatccaactggttgcggcgacgcgtttcgcgccggcctgatctatggtattcagcataattatgattggttgaccattggccgcatgggaaacttaatgggtgcgctgaaagtggaacaccctggcacgcaaaatcagcgtttcgattttgccgaattcaacgaccagttcaaacaagattttggctacgcgctc

SEQ ID NO: 578 - protein, 321 aa, synthetic construct
  REGION 1..321: note = Variant of adenosine kinase
MHHHHHHGGSGMSALICGSLAYDTIMVFPDQFKNHILPDRVHRLNVSFLVPRMRREFGGCAGNIAYNLHLLGGAPIPMGTVGQDFGPYREHFETLGIDLSRVKIIDDLSTPQAFITTDHDHNQITAFHPGAMMRSYENHVRDVPGVTLGLVGPDGREGMIQNAEEFAAGGIPFIFDPGQAVPLFNGPELREFIEQADYVVVNDYESNLLQERTGWNEQDIVSRVQAYITTQGSKGALVHTPEKTYDIPPAHERRVVDPTGCGDAFRAGLIYGIQHNYDWLTIGRMGNLMGALKVEHPGTQNQRFDFAEFNDQFKQDFGYAL

SEQ ID NO: 579 - DNA, 963 bp, synthetic construct
  misc_feature 1..963: note = Variant of adenosine kinase
  source 1..963: mol_type = other DNA
atgcaccatcatcaccatcacgggggctccggcatgagtgcactgatttgcggttctttagcgtatgataccatcatggtgtttccggaccagttcaagaaccatattctgcccgatcgtgttcaccgcctcaatgtcagctttcttgtaccacgcatgcgtcgtgaatttggaggctgtgccggcaacattgcgtacaatctgcatctgttgggtggtgctccgatccctatgggaacggtgggccaagatttcggtccgtatcgcgagcacttcgaaactctgggcattgacttatcccgcgtcaagatcatcgatgatctgagtacaccgcaggccttcattaccaccgaccatgatcataaccagattacggcgtttcatccaggcgcaatgatgcgttcgtacgaaaatcacgttcgtgatgtgccgggtgttaccttgggcctcgtaggtcctgatggatatgagggcatgatccaaaatgccgaagaatttgctgctggtggcattccgttcatttttgacccaggtcaggcactgccgctgttcaacggccccgaactgcgcgagtttatcgaacaggcggactatgtggtggtcaacgattacgaaagcaatcttcttcaagaacgtactggctggaacgagcaggacattgtttcacgcgtgcaggcgtatatcaccacgcaaggttcgaaaggagccctggtacatacaccggagaagacctacgatattccgccggcacacgaacgtcgtgtcgttgatccaactggttgcggcgacgcgtttcgcgccggcctgatctatggtattcagcataattatgattggttgaccattggccgcatgggaaacttaatgggtgcgctgaaagtggaacaccctggcacgcaaaatcagcgtttcgattttgccgaattcaacgaccagttcaaacaagattttggctacgcgctc

SEQ ID NO: 580 - protein, 321 aa, synthetic construct
  REGION 1..321: note = Variant of adenosine kinase
MHHHHHHGGSGMSALICGSLAYDTIMVFPDQFKNHILPDRVHRLNVSFLVPRMRREFGGCAGNIAYNLHLLGGAPIPMGTVGQDFGPYREHFETLGIDLSRVKIIDDLSTPQAFITTDHDHNQITAFHPGAMMRSYENHVRDVPGVTLGLVGPDGYEGMIQNAEEFAAGGIPFIFDPGQALPLFNGPELREFIEQADYVVVNDYESNLLQERTGWNEQDIVSRVQAYITTQGSKGALVHTPEKTYDIPPAHERRVVDPTGCGDAFRAGLIYGIQHNYDWLTIGRMGNLMGALKVEHPGTQNQRFDFAEFNDQFKQDFGYAL

SEQ ID NO: 581 - DNA, 963 bp, synthetic construct
  misc_feature 1..963: note = Variant of adenosine kinase
  source 1..963: mol_type = other DNA
atgcaccatcatcaccatcacgggggctccggcatgagtgcactgatttgcggttctttagcgtatgataccatcatggtgtttccggaccagttcaagaaccatattctgcccgatcgtgttcaccgcctcaatgtcagctttcttgtaccacgcatgcgtcgtgaatttggaggctgtgccggcaacattgcgtacaatctgcatctgttgggtggtgctccgatccctatgggaacggtgggccaagatttcggtccgtatcgcgagcacttcgaaactctgggcattgacttatcccgcgtcaagatcatcgatgatctgagtacaccgcaggccttcattaccaccgaccatgatcataaccagattacggcgtttcatccaggcgcaatgatgcgttcgtacgaaaatcacgttcgtgatgtgccgggtgttaccttgggcctcgtaggtcctgatggacgcgagggcatgatccaaaatgccgaagaatttgctgctggtggcattccgttcatttttgacccaggtcaggcactgccgctgttcaacggccccgaactgcgcgagtttatcgaacaggcggactatgtggtggtcaacgattacgaaagcaatcttcttcaagaacgtactggctggaacgagcaggacattgtttcacgcgtgcaggcgtatatcaccacgcaaggttcgaaaggagccctggtacatacaccggagaagacctacgatcttccgccggcacacgaacgtcgtgtcgttgatccaactggttgcggcgacgcgtttcgcgccggcctgatctatggtattcagcataattatgattggttgaccattggccgcatgggaaacttaatgggtgcgctgaaagtggaacaccctggcacgcaaaatcagcgtttcgattttgccgaattcaacgaccagttcaaacaagattttggctacgcgctc

SEQ ID NO: 582 - protein, 321 aa, synthetic construct
  REGION 1..321: note = Variant of adenosine kinase
MHHHHHHGGSGMSALICGSLAYDTIMVFPDQFKNHILPDRVHRLNVSFLVPRMRREFGGCAGNIAYNLHLLGGAPIPMGTVGQDFGPYREHFETLGIDLSRVKIIDDLSTPQAFITTDHDHNQITAFHPGAMMRSYENHVRDVPGVTLGLVGPDGREGMIQNAEEFAAGGIPFIFDPGQALPLFNGPELREFIEQADYVVVNDYESNLLQERTGWNEQDIVSRVQAYITTQGSKGALVHTPEKTYDLPPAHERRVVDPTGCGDAFRAGLIYGIQHNYDWLTIGRMGNLMGALKVEHPGTQNQRFDFAEFNDQFKQDFGYAL

SEQ ID NO: 583 - DNA, 963 bp, synthetic construct
  misc_feature 1..963: note = Variant of adenosine kinase
  source 1..963: mol_type = other DNA
atgcaccatcatcaccatcacgggggctccggcatgagtgcactgatttgcggttctttagcgtatgataccatcatggtgtttccggaccagttcaagaaccatattctgcccgatcgtgttcaccgcctcaatgtcagctttcttgtaccacgcatgcgtcgtgaatttggaggctgtgccggcaacattgcgtacaatctgcatctgttgggtggtgctccgatccctatgggaacggtgggccaagatttcggtccgtatcgcgagcacttcgaaactctgggcattgacttatcccgcgtcaagatcatcgatgatctgagtacaccgcaggccttcattaccaccgaccatgatcataaccagattacggcgtttcatccaggcgcaatgatgcgttcgtacgaaaatcacgttcgtgatgtgccgggtgttaccttgggcctcgtaggtcctgatggacgcgagggcatgatccaaaatgccgaagaatttgctgctggtggcattccgttcatttttgacccaggtcaggcactgccgctgttcaacggccccgaactgcgcgagtttatcgaacaggcggactatgtggtggtcaacgattacgaaagcaatcttcttcaagaacgtactggctggaacgagcaggacattgtttcacgcgtgcaggcgtatatcaccacgcaaggttcgaaaggagccctggtacatacaccggagaagacctacgatattccgccggcacacgaacgtcgtgtcgttgatccaactggttgcggcgacgcgtttcgcgccggcctgatctatggtattcagcataattatgattggttgaccattggccgcatgggaaacgtgatgggtgcgctgaaagtggaacaccctggcacgcaaaatcagcgtttcgattttgccgaattcaacgaccagttcaaacaagattttggctacgcgctc

SEQ ID NO: 584 - protein, 321 aa, synthetic construct
  REGION 1..321: note = Variant of adenosine kinase
MHHHHHHGGSGMSALICGSLAYDTIMVFPDQFKNHILPDRVHRLNVSFLVPRMRREFGGCAGNIAYNLHLLGGAPIPMGTVGQDFGPYREHFETLGIDLSRVKIIDDLSTPQAFITTDHDHNQITAFHPGAMMRSYENHVRDVPGVTLGLVGPDGREGMIQNAEEFAAGGIPFIFDPGQALPLFNGPELREFIEQADYVVVNDYESNLLQERTGWNEQDIVSRVQAYITTQGSKGALVHTPEKTYDIPPAHERRVVDPTGCGDAFRAGLIYGIQHNYDWLTIGRMGNVMGALKVEHPGTQNQRFDFAEFNDQFKQDFGYAL

SEQ ID NO: 585 - DNA, 963 bp, synthetic construct
  misc_feature 1..963: note = Variant of adenosine kinase
  source 1..963: mol_type = other DNA
atgcaccatcatcaccatcacgggggctccggcatgagtgcactgatttgcggttctttagcgtatgataccatcatggtgtttccggaccagttcaagaaccatattctgcccgatcgtgttcaccgcctcaatgtcagctttcttgtaccacgcatgcgtcgtgaatttggaggctgtgccggcaacattgcgtacaatctgcatctgttgggtggtgctccgatccctatgggaacggtgggccaagatttcggtccgtatcgcgagcacttcgaaactctgggcattgacttatcccgcgtcaagatcatcgatgatctgagtacaccgcaggccttcattaccaccgaccatgatcataaccagattacggcgtttcatccaggcgcaatgatgcgttcgtacgaaaatcacgttcgtgatgtgccgggtgttaccttgggcctcgtaggtcctgatggacgcgagggcatgatccaaaatgccgaagaatttgctgctggtggcattccgttcatttttgacccaggtcaggcactgccgctgttcaacggccccgaactgcgcgagtttatcgaacaggcggactatgtggtggtcaacgattacgaaagcaatcttcttcaagaacgtactggctggaacgagcaggacattgtttcacgcgtgcaggcgtatatcaccacgcaaggttcgaaaggagccctggtacatacaccggagaagacctacgatattccgccggcacacgaacgtcgtgtcgttgatccaactggttgcggcgacgcgtttcgcgccggcctgatctatggtattcagcataattatgattggttgaccattggccgcatgggaaacttaatgggtgcgaagaaagtggaacaccctggcacgcaaaatcagcgtttcgattttgccgaattcaacgaccagttcaaacaagattttggctacgcgctc

SEQ ID NO: 586 - protein, 321 aa, synthetic construct
  REGION 1..321: note = Variant of adenosine kinase
MHHHHHHGGSGMSALICGSLAYDTIMVFPDQFKNHILPDRVHRLNVSFLVPRMRREFGGCAGNIAYNLHLLGGAPIPMGTVGQDFGPYREHFETLGIDLSRVKIIDDLSTPQAFITTDHDHNQITAFHPGAMMRSYENHVRDVPGVTLGLVGPDGREGMIQNAEEFAAGGIPFIFDPGQALPLFNGPELREFIEQADYVVVNDYESNLLQERTGWNEQDIVSRVQAYITTQGSKGALVHTPEKTYDIPPAHERRVVDPTGCGDAFRAGLIYGIQHNYDWLTIGRMGNLMGAKKVEHPGTQNQRFDFAEFNDQFKQDFGYAL

SEQ ID NO: 587 - DNA, 963 bp, synthetic construct
  misc_feature 1..963: note = Variant of adenosine kinase
  source 1..963: mol_type = other DNA
atgcaccatcatcaccatcacgggggctccggcatgagtgcactgatttgcggttctttagcgtatgataccatcatggtgtttccggaccagttcaagaaccatattctgcccgatcgtgttcaccgcctcaatgtcagctttcttgtaccacgcatgcgtcgtgaatttggaggctgtgccggcaacattgcgtacaatctgcatctgttgggtggtgctccgatccctatgggaacggtgggccaagatttcggtccgtatcgcgagcacttcgaaactctgggcattgacttatcccgcgtcaagatcatcgatgatctgagtacaccgcaggccttcattaccaccgaccatgatcataaccagattacggcgtttcatccaggcgcaatgatgcgttcgtacgaaaatcacgttcgtgatgtgccgggtgttaccttgggcctcgtaggtcctgatggacgcgagggcatgatccaaaatgccgaagaatttgctgctggtggcattccgttcatttttgacccaggtcaggcagctccgctgttcaacggccccgaactgcgcgagtttatcgaacaggcggactatgtggtggtcaacgattacgaaagcaatcttcttcaagaacgtactggctggaacgagcaggacattgtttcacgcgtgcaggcgtatatcaccacgcaaggttcgaaaggagccctggtacatacaccggagaagacctacgatattccgccggcacacgaacgtcgtgtcgttgatccaactggttgcggcgacgcgtttcgcgccggcctgatctatggtattcagcataattatgattggttgaccattggccgcatgggaaacttaatgggtgcgctgaaagtggaacaccctggcacgcaaaatcagcgtttcgattttgccgaattcaacgaccagttcaaacaagattttggctacgcgctc

SEQ ID NO: 588 - protein, 321 aa, synthetic construct
  REGION 1..321: note = Variant of adenosine kinase
MHHHHHHGGSGMSALICGSLAYDTIMVFPDQFKNHILPDRVHRLNVSFLVPRMRREFGGCAGNIAYNLHLLGGAPIPMGTVGQDFGPYREHFETLGIDLSRVKIIDDLSTPQAFITTDHDHNQITAFHPGAMMRSYENHVRDVPGVTLGLVGPDGREGMIQNAEEFAAGGIPFIFDPGQAAPLFNGPELREFIEQADYVVVNDYESNLLQERTGWNEQDIVSRVQAYITTQGSKGALVHTPEKTYDIPPAHERRVVDPTGCGDAFRAGLIYGIQHNYDWLTIGRMGNLMGALKVEHPGTQNQRFDFAEFNDQFKQDFGYAL

SEQ ID NO: 589 - DNA, 963 bp, synthetic construct
  misc_feature 1..963: note = Variant of adenosine kinase
  source 1..963: mol_type = other DNA
atgcaccatcatcaccatcacgggggctccggcatgagtgcactgatttgcggttctttagcgtatgataccatcatggtgtttccggaccagttcaagaaccatattctgcccgatcgtgttcaccgcctcaatgtcagctttcttgtaccacgcatgcgtcgtgaatttggaggctgtgccggcaacattgcgtacaatctgcatctgttgggtggtgctccgatccctatgggaacggtgggccaagatttcggtccgtatcgcgagcacttcgaaactctgggcattgacttatcccgcgtcaagatcatcgatgatctgagtacaccgcaggccttcattaccaccgaccatgatcataaccagattacggcgtttcatccaggcgcaatgatgcgttcgtacgaaaatcacgttcgtgatgtgccgggtgttaccttgggcctcgtaggtcctgatggacgcgagggcatgatccaaaatgccgaagaatttgctgctggtggcattccgttcatttttgacccaggtcaggcactgccgctgttcaacggccccgaactgcgcgagtttatcgaacaggcggactatgtggtggtcaacgattacgaaagcaatcttcttcaagaacgtactggctggaacgagcaggacattgtttcacgcgtgcaggcgtatatcaccacgcaaggttcgaaaggagccctggtacatacaccggagaagacctacgatattccgcgggcacacgaacgtcgtgtcgttgatccaactggttgcggcgacgcgtttcgcgccggcctgatctatggtattcagcataattatgattggttgaccattggccgcatgggaaacttaatgggtgcgctgaaagtggaacaccctggcacgcaaaatcagcgtttcgattttgccgaattcaacgaccagttcaaacaagattttggctacgcgctc

SEQ ID NO: 590 - protein, 321 aa, synthetic construct
  REGION 1..321: note = Variant of adenosine kinase
MHHHHHHGGSGMSALICGSLAYDTIMVFPDQFKNHILPDRVHRLNVSFLVPRMRREFGGCAGNIAYNLHLLGGAPIPMGTVGQDFGPYREHFETLGIDLSRVKIIDDLSTPQAFITTDHDHNQITAFHPGAMMRSYENHVRDVPGVTLGLVGPDGREGMIQNAEEFAAGGIPFIFDPGQALPLFNGPELREFIEQADYVVVNDYESNLLQERTGWNEQDIVSRVQAYITTQGSKGALVHTPEKTYDIPRAHERRVVDPTGCGDAFRAGLIYGIQHNYDWLTIGRMGNLMGALKVEHPGTQNQRFDFAEFNDQFKQDFGYAL

SEQ ID NO: 591 - DNA, 963 bp, synthetic construct
  misc_feature 1..963: note = Variant of adenosine kinase
  source 1..963: mol_type = other DNA
atgcaccatcatcaccatcacgggggctccggcatgagtgcactgatttgcggttctttagcgtatgataccatcatggtgtttccggaccagttcaagaaccatattctgcccgatcgtgttcaccgcctcaatgtcagctttcttgtaccacgcatgcgtcgtgaatttggaggctgtgccggcaacattgcgtacaatctgcatctgttgggtggtgctccgatccctatgggaacggtgggccaagatttcggtccgtatcgcgagcacttcgaaactctgggcattgacttatcccgcgtcaagatcatcgatgatctgagtacaccgcaggccttcattaccaccgaccatgatcataaccagattacggcgtttcatccaggcgcaatgatgcgttcgtacgaaaatcacgttcgtgatgtgccgggtgttaccttgggcctcgtaggtcctgatggacgcgagggcatgatccagaatgccgaagaatttgctgctggtggcattccgttcatttttgacccaggtcaggcactgccgctgttcaacggccccgaactgcgcgagtttatcgaacaggcggactatgtggtggtcaacgattacgaaagcaatcttcttcaagaacgtactggctggaacgagcaggacattgtttcacgcgtgcaggcgtatatcaccacgcaaggttcgaaaggagccctggtacatacaccggagaagacctacgatattccgccgcatcacgaacgtcgtgtcgttgatccaactggttgcggcgacgcgtttcgcgccggcctgatctatggtattcagcataattatgattggttgaccattggccgcatgggaaacttaatgggtgcgctgaaagtggaacaccctggcacgcaaaatcagcgtttcgattttgccgaattcaacgaccagttcaaacaagattttggctacgcgctc

SEQ ID NO: 592 - protein, 321 aa, synthetic construct
  REGION 1..321: note = Variant of adenosine kinase
MHHHHHHGGSGMSALICGSLAYDTIMVFPDQFKNHILPDRVHRLNVSFLVPRMRREFGGCAGNIAYNLHLLGGAPIPMGTVGQDFGPYREHFETLGIDLSRVKIIDDLSTPQAFITTDHDHNQITAFHPGAMMRSYENHVRDVPGVTLGLVGPDGREGMIQNAEEFAAGGIPFIFDPGQALPLFNGPELREFIEQADYVVVNDYESNLLQERTGWNEQDIVSRVQAYITTQGSKGALVHTPEKTYDIPPHHERRVVDPTGCGDAFRAGLIYGIQHNYDWLTIGRMGNLMGALKVEHPGTQNQRFDFAEFNDQFKQDFGYAL

SEQ ID NO: 593 - DNA, 963 bp, synthetic construct
  misc_feature 1..963: note = Variant of adenosine kinase
  source 1..963: mol_type = other DNA
atgcaccatcatcaccatcacgggggctccggcatgagtgcactgatttgcggttctttagcgtatgataccatcatggtgtttccggaccagttcaagaaccatattctgcccgatcgtgttcaccgcctcaatgtcagctttcttgtaccacgcatgcgtcgtgaatttggaggctgtgccggcaacattgcgtacaatctgcatctgttgggtggtgctccgatcgtaatggctacggtgggccaagatttcggtccgtatcgcgagcacttcgaaactctgggcattgacttatcccgcgtcaagatcatcgatgatctgagtacaccgcaggccttcattaccaccgaccatgatcataaccagattacggcgtttcatccaggcgcaatgatgcgttcgtacgaaaatcacgttcgtgatgtgccgggtgttaccttgggcctcgtaggtcctgatggacgcgagggcatgatccaaaatgccgaagaatttgctgctggtggcattccgttcatttttgacccaggtcaggcactgccgctgttcaacggccccgaactgcgcgagtttatcgaacaggcggactatgtggtggtcaacgattacgaaagcaatcttcttcaaacgcgtactggctggaacgagcaggacattgtttcacgcgtgcaggcgtatatcaccacgcaaggttcgaaaggagccctggtacatacaccggagaagacctacgatattccgccggcacacgaacgtcgtgtcgttgatccaactggttgcggcgacgcgtttcgcgccggcctgatctatggtattcagcataattatgattggttgaccattggccgcatgggaaacttaatgggtgcgctgaaagtggaacaccctggcgggcaaaatcagcgtttcgattttgccgaattcaacgaccagttcaaacaatattttggctacgcgctc

SEQ ID NO: 594 - protein, 321 aa, synthetic construct
  REGION 1..321: note = Variant of adenosine kinase
MHHHHHHGGSGMSALICGSLAYDTIMVFPDQFKNHILPDRVHRLNVSFLVPRMRREFGGCAGNIAYNLHLLGGAPIVMATVGQDFGPYREHFETLGIDLSRVKIIDDLSTPQAFITTDHDHNQITAFHPGAMMRSYENHVRDVPGVTLGLVGPDGREGMIQNAEEFAAGGIPFIFDPGQALPLFNGPELREFIEQADYVVVNDYESNLLQTRTGWNEQDIVSRVQAYITTQGSKGALVHTPEKTYDIPPAHERRVVDPTGCGDAFRAGLIYGIQHNYDWLTIGRMGNLMGALKVEHPGGQNQRFDFAEFNDQFKQYFGYAL

SEQ ID NO: 595 - DNA, 963 bp, synthetic construct
  misc_feature 1..963: note = Variant of adenosine kinase
  source 1..963: mol_type = other DNA
atgcaccatcatcaccatcacgggggctccggcatgagtgcactgatttgcggttctttaggttatgataccatcatggtgtttccggaccagttcaagaaccatattctgcccgatcgtgttcaccgcctcaatgtcagctttcttgtaccacgcatgcgtcgtgaatttggaggctgtgccggcaacattgcgtacaatctgcatctgttgggtggtgctccgatcgtaatggctacggtgggccaagatttcggtccgtatcgcgagcacttcgaaactctgggcattgacttatcccgcgtcaagatcatcgatgatctgagtacaccgcaggccttcattaccaccgaccatgatcataaccagattacggcgtttcatccaggcgcaatgatgcgttcgtacgaaaatcacgttcgtgatgtgccgggtgttaccttgggcctcgtaggtcctgatggacgcgagggcatgatccaaaatgccgaagaatttgctgctggtggcattccgttcatttttgacccaggtcaggcactgccgctgttcaacggccccgaactgcgcgagtttatcgaacaggcggactatgtggtggtcaacgattacgaaagcaatcttcttcaaacgcgtactggctggaacgagcaggacattgtttcacgcgtgcaggcgtatatcaccacgcaaggttcgaaaggagccctggtacatacaccggagaagacctacgatattccgccggcacacgaacgtcgtgtcgttgatccaactggttgcggcgacgcgtttcgcgccggcctgatctatggtattcagcataattatgattggttgaccattggccgcatgggaaacttaatgggtgcgctgaaagtggaacaccctggcacgcaaaatcagcgtttcgattttgccgaattcaacgaccagttcaaacaatattttggctacgcgctc

SEQ ID NO: 596 - protein, 321 aa, synthetic construct
  REGION 1..321: note = Variant of adenosine kinase
MHHHHHHGGSGMSALICGSLGYDTIMVFPDQFKNHILPDRVHRLNVSFLVPRMRREFGGCAGNIAYNLHLLGGAPIVMATVGQDFGPYREHFETLGIDLSRVKIIDDLSTPQAFITTDHDHNQITAFHPGAMMRSYENHVRDVPGVTLGLVGPDGREGMIQNAEEFAAGGIPFIFDPGQALPLFNGPELREFIEQADYVVVNDYESNLLQTRTGWNEQDIVSRVQAYITTQGSKGALVHTPEKTYDIPPAHERRVVDPTGCGDAFRAGLIYGIQHNYDWLTIGRMGNLMGALKVEHPGTQNQRFDFAEFNDQFKQYFGYAL

SEQ ID NO: 597 - DNA, 963 bp, synthetic construct
  misc_feature 1..963: note = Variant of adenosine kinase
  source 1..963: mol_type = other DNA
atgcaccatcatcaccatcacgggggctccggcatgagtgcactgatttgcggttctttagcgtatgataccatcatggtgtttccggaccagttcaagaaccatattctgcccgatcgtgttcaccgcctcaatgtcagctttcttgtaccacgcatgcgtcgtgaatttggaggctgtgccggcaacattgcgtacaatctgcatctgttgggtggtgctccgatcgtaatggctacggtgggccaagatttcggtccgtatcgcgagcacttcgaaactctgggcattgacttatcccgcgtcaagatcatcgatgatctgagtacaccgcaggccttcattaccaccgaccatgatcataaccagattacggcgtttcatccaggcgcaatgatgcgttcgtacgaaaatcacgttcgtgatgtgccgggtgttaccttgggcctcgtaggtcctgatggacgcgagggcatgatccaaaatgccgaagaatttgctgctggtggcattccgttcatttttgacccaggtcaggcactgccgctgttcaacggccccgaactgcgcgagtttatcgaacaggcggactatgtggtggtcaacgattacgaaagcaatcttcttcaaacgcgtactggctggaacgagcaggacattgtttcacgcgtgcaggcgtatatcaccacgcaaggttcgaaaggagccctggtacatacaccggagaagacctacgatattccgccggcacacgaacgtcgtgtcgttgatccaactggttgcggcgacgcgtttcgcgccggcctgatctatggtattcagcataattatgattggttgaccattggccgcatgggaaacttaatgggtgcgctgaaagtggaacaccctggctctcaaaatcagcgtttcgattttgccgaattcaacgaccagttcaaacaatattttggctacgcgctc

SEQ ID NO: 598 - protein, 321 aa, synthetic construct
  REGION 1..321: note = Variant of adenosine kinase
MHHHHHHGGSGMSALICGSLAYDTIMVFPDQFKNHILPDRVHRLNVSFLVPRMRREFGGCAGNIAYNLHLLGGAPIVMATVGQDFGPYREHFETLGIDLSRVKIIDDLSTPQAFITTDHDHNQITAFHPGAMMRSYENHVRDVPGVTLGLVGPDGREGMIQNAEEFAAGGIPFIFDPGQALPLFNGPELREFIEQADYVVVNDYESNLLQTRTGWNEQDIVSRVQAYITTQGSKGALVHTPEKTYDIPPAHERRVVDPTGCGDAFRAGLIYGIQHNYDWLTIGRMGNLMGALKVEHPGSQNQRFDFAEFNDQFKQYFGYAL

SEQ ID NO: 599 - DNA, 963 bp, synthetic construct
  misc_feature 1..963: note = Variant of adenosine kinase
  source 1..963: mol_type = other DNA
atgcaccatcatcaccatcacgggggctccggcatgagtgcactgatttgcggttctttagcgtatgataccatcatggtgtttccggaccagttcaagaaccatattctgcccgatcgtgttcaccgcctcaatgtcagctttcttgtaccacgcatgcgtcgtgaatttggaggctgtgccggcaacattgcgtacaatctgcatctgttgggtggtgctccgatcgtaatggctacggtgggccaagatttcggtccgtatcgcgagcacttcgaaactctgggcattgacttatcccgcgtcaagatcatcgatgatctgagtacaccgcagagtttcattaccaccgaccatgatcataaccagattacggcgtttcatccaggcgcaatgatgcgttcgtacgaaaatcacgttcgtgatgtgccgggtgttaccttgggcctcgtaggtcctgatggacgcgagggcatgatccaaaatgccgaagaatttgctgctggtggcattccgttcatttttgacccaggtcaggcactgccgctgttcaacggccccgaactgcgcgagtttatcgaacaggcggactatgtggtggtcaacgattacgaaagcaatcttcttcaaacgcgtactggctggaacgagcaggacattgtttcacgcgtgcaggcgtatatcaccacgcaaggttcgaaaggagccctggtacatacaccggagaagacctacgatattccgccggcacacgaacgtcgtgtcgttgatccaactggttgcggcgacgcgtttcgcgccggcctgatctatggtattcagcataattatgattggttgaccattggccgcatgggaaacttaatgggtgcgctgaaagtggaacaccctggcacgcaaaatcagcgtttcgattttgccgaattcaacgaccagttcaaacaatattttggctacgcgctc

SEQ ID NO: 600 - protein, 321 aa, synthetic construct
  REGION 1..321: note = Variant of adenosine kinase
MHHHHHHGGSGMSALICGSLAYDTIMVFPDQFKNHILPDRVHRLNVSFLVPRMRREFGGCAGNIAYNLHLLGGAPIVMATVGQDFGPYREHFETLGIDLSRVKIIDDLSTPQSFITTDHDHNQITAFHPGAMMRSYENHVRDVPGVTLGLVGPDGREGMIQNAEEFAAGGIPFIFDPGQALPLFNGPELREFIEQADYVVVNDYESNLLQTRTGWNEQDIVSRVQAYITTQGSKGALVHTPEKTYDIPPAHERRVVDPTGCGDAFRAGLIYGIQHNYDWLTIGRMGNLMGALKVEHPGTQNQRFDFAEFNDQFKQYFGYAL

SEQ ID NO: 601 - DNA, 963 bp, synthetic construct
  misc_feature 1..963: note = Variant of adenosine kinase
  source 1..963: mol_type = other DNA
atgcaccatcatcaccatcacgggggctccggcatgagtgcactgatttgcggttctttagcgtatgataccatcatggtgtttccggaccagttcaagaaccatattctgcccgatcgtgttcaccgcctcaatgtcagctttcttgtaccacgcatgcgtcgtgaatttggaggctgtgccggcaacattgcgtacaatctgcatctgttgggtggtgctccgatcgtaatggctacggtgggccaagatttcggtccgtatcgcgagcacttcgaaactctgggcattgacttatcccgcgtcaagatcatcgatgatctgagtacaccgcaggccttcattaccaccgaccatgatcataaccagattacggcgtttcatccaggcgcaatgatgcgttcgtacgaaaatcacgttcgtgatgtgccgggtgttaccttgggcctcgtatgtcctgatggacgcgagggcatgatccaaaatgccgaagaatttgctgctggtggcattccgttcatttttgacccaggtcaggcactgccgctgttcaacggccccgaactgcgcgagtttatcgaacaggcggactatgtggtggtcaacgattacgaaagcaatcttcttcaaacgcgtactggctggaacgagcaggacattgtttcacgcgtgcaggcgtatatcaccacgcaaggttcgaaaggagccctggtacatacaccggagaagacctacgatattccgccggcacacgaacgtcgtgtcgttgatccaactggttgcggcgacgcgtttcgcgccggcctgatctatggtattcagcataattatgattggttgaccattggccgcatgggaaacttaatgggtgcgctgaaagtggaacaccctggcacgcaaaatcagcgtttcgattttgccgaattcaacgaccagttcaaacaatattttggctacgcgctc

SEQ ID NO: 602 - protein, 321 aa, synthetic construct
  REGION 1..321: note = Variant of adenosine kinase
MHHHHHHGGSGMSALICGSLAYDTIMVFPDQFKNHILPDRVHRLNVSFLVPRMRREFGGCAGNIAYNLHLLGGAPIVMATVGQDFGPYREHFETLGIDLSRVKIIDDLSTPQAFITTDHDHNQITAFHPGAMMRSYENHVRDVPGVTLGLVCPDGREGMIQNAEEFAAGGIPFIFDPGQALPLFNGPELREFIEQADYVVVNDYESNLLQTRTGWNEQDIVSRVQAYITTQGSKGALVHTPEKTYDIPPAHERRVVDPTGCGDAFRAGLIYGIQHNYDWLTIGRMGNLMGALKVEHPGTQNQRFDFAEFNDQFKQYFGYAL

SEQ ID NO: 603 - DNA, 963 bp, synthetic construct
  misc_feature 1..963: note = Variant of adenosine kinase
  source 1..963: mol_type = other DNA
atgcaccatcatcaccatcacgggggctccggcatgagtgcactgatttgcggttctttagcgtatgataccatcatggtgtttccggaccagttcaagaaccatattctgcccgatcgtgttcaccgcctcaatgtcagctttcttgtaccacgcatgcgtcgtgaatttggaggctgtgccggcaacattgcgtacaatctgcatctgttgggtggtgctccgatcgtaatggctacggtgggccaagatttcggtccgtatcgcgagcacttcgaaactctgggcattgacttatcccgcgtcaagatcatcgatgatctgagtacaccgcaggccttcattaccaccgaccatgatcataaccagattacggcgtttcatccaggcgcaatgatgcgttcgtacgaaaatcacgttcgtgatgtgccgggtgttaccttgggcctcgtaggtcctgatggacgcgagggcatgatccaaaatgccgaagaatttgctgctgatggcattccgttcatttttgacccaggtcaggcactgccgctgttcaacggccccgaactgcgcgagtttatcgaacaggcggactatgtggtggtcaacgattacgaaagcaatcttcttcaaacgcgtactggctggaacgagcaggacattgtttcacgcgtgcaggcgtatatcaccacgcaaggttcgaaaggagccctggtacatacaccggagaagacctacgatattccgccggcacacgaacgtcgttgtgttgatccaactggttgcggcgacgcgtttcgcgccggcctgatctatggtattcagcataattatgattggttgaccattggccgcatgggaaacttaatgggtgcgctgaaagtggaacaccctggcacgcaaaatcagcgtttcgattttgccgaattcaacgaccagttcaaacaatattttggctacgcgctc

SEQ ID NO: 604 - protein, 321 aa, synthetic construct
  REGION 1..321: note = Variant of adenosine kinase
MHHHHHHGGSGMSALICGSLAYDTIMVFPDQFKNHILPDRVHRLNVSFLVPRMRREFGGCAGNIAYNLHLLGGAPIVMATVGQDFGPYREHFETLGIDLSRVKIIDDLSTPQAFITTDHDHNQITAFHPGAMMRSYENHVRDVPGVTLGLVGPDGREGMIQNAEEFAADGIPFIFDPGQALPLFNGPELREFIEQADYVVVNDYESNLLQTRTGWNEQDIVSRVQAYITTQGSKGALVHTPEKTYDIPPAHERRCVDPTGCGDAFRAGLIYGIQHNYDWLTIGRMGNLMGALKVEHPGTQNQRFDFAEFNDQFKQYFGYAL

SEQ ID NO: 605 - DNA, 963 bp, synthetic construct
  misc_feature 1..963: note = Variant of adenosine kinase
  source 1..963: mol_type = other DNA
atgcaccatcatcaccatcacgggggctccggcatgagtgcactgatttgcggttctttagcgtatgataccatcatggtgtttccggaccagttcaagaaccatattctgcccgatcgtgttcaccgcctcaatgtcagctttcttgtaccacgcatgcgtcgtgaatttggaggctgtgccggcaacattgcgtacaatctgcatctgttgggtggtgctccgatcgtaatggctacggtgggccaagatttcggtccgtatcgcgagcacttcgaaactctgggcattgacttatcccgcgtcaagatcatcgatgatctgagtacaccgcaggccttcattaccaccgaccatgatcataaccagattacggcgtttcatccaggcgcaatgatgcgttcgtacgaaaatcacgttcgtgatgtgccgggtgttaccttgggcctcgtaggtcctgatggacgcgagggcatgatccaaaatgccgaagaatttgctgctggtggcattccgttcatttttgacccaggtcaggcactgccgctgttcaacggccccgaactgcgcgagtttatcgaacaggcggactatgtggtggtcaacgattacgaaagcaatcttcttcaaacgcgtactggctggaacgagcaggacattgtttcacgcgtgcaggcgtatatcaccacgcaaggttcgaaaggagccctggtacatacaccggagaagacctacgatattccgccggcaaaggaacgtcgtgtcgttgatccaactggttgcggcgacgcgtttcgcgccggcctgatctatggtattcagcataattatgattggttgaccattggccgcatgggaaacttaatgggtgcgctgaaagtggaacaccctggcacgcaaaatcagcgtttcgattttgccgaattcaacgaccagttcaaacaatattttggctacgcgctc

SEQ ID NO: 606 - protein, 321 aa, synthetic construct
  REGION 1..321: note = Variant of adenosine kinase
MHHHHHHGGSGMSALICGSLAYDTIMVFPDQFKNHILPDRVHRLNVSFLVPRMRREFGGCAGNIAYNLHLLGGAPIVMATVGQDFGPYREHFETLGIDLSRVKIIDDLSTPQAFITTDHDHNQITAFHPGAMMRSYENHVRDVPGVTLGLVGPDGREGMIQNAEEFAAGGIPFIFDPGQALPLFNGPELREFIEQADYVVVNDYESNLLQTRTGWNEQDIVSRVQAYITTQGSKGALVHTPEKTYDIPPAKERRVVDPTGCGDAFRAGLIYGIQHNYDWLTIGRMGNLMGALKVEHPGTQNQRFDFAEFNDQFKQYFGYAL

SEQ ID NO: 607 - DNA, 963 bp, synthetic construct
  misc_feature 1..963: note = Variant of adenosine kinase
  source 1..963: mol_type = other DNA
atgcaccatcatcaccatcacgggggctccggcatgagtgcactgatttgcggttctttagcgtatgataccatcatggtgtttccggaccagttcaagaaccatattctgcccgatcgtgttcaccgcctcaatgtcagctttcttgtaccacgcatgcgtcgtgaatttggaggctgtgccggcaacattgcgtacaatctgcatctgttgggtggtgctccgatcgtaatggctacggtgggccaagatttcggtccgtatcgcgagcacttcgaaactctgggcattgacttatcccgcgtcaagatcatcgatgatctgagtacaccgcaggccttcattaccaccgaccatgatcataaccagattacggcgtttcatccaggcgcaatgatgcgttcgtacgaaaatcacgttcgtgatgtgccgggtgttaccttgggcctcgtaggtcctgatggacgcgagggcatgatccaaaatgccgaagaatttgctgctggtggcattccgttcatttttgacccaggtcaggcactgccgctgttcaacggccccgaactgcgcgagtttatcgaacaggcggactatgtggtggtcaacgattacgaaagcaatcttcttcaaacgcgtactggctggaacgagcaggacattgtttcacgcgtgcaggcgtatatcaccacgcaaggttcgaaaggagccctggtacatacaccggagaagacctacgatattccgccggcacacgaacgtcgtgtcgttgatccaactggttgcggcgacgcgtttcgcgccggcctgatctatggtattcagcataattatgattggttgaccattggccgcatgggaaacttaatgggtgcgctgaaactggaacaccctggcacgcaaaatcagcgtttcgattttgccgaattcaacgaccagttcaaacaatattttggctacgcgctc

SEQ ID NO: 608 - protein, 321 aa, synthetic construct
  REGION 1..321: note = Variant of adenosine kinase
MHHHHHHGGSGMSALICGSLAYDTIMVFPDQFKNHILPDRVHRLNVSFLVPRMRREFGGCAGNIAYNLHLLGGAPIVMATVGQDFGPYREHFETLGIDLSRVKIIDDLSTPQAFITTDHDHNQITAFHPGAMMRSYENHVRDVPGVTLGLVGPDGREGMIQNAEEFAAGGIPFIFDPGQALPLFNGPELREFIEQADYVVVNDYESNLLQTRTGWNEQDIVSRVQAYITTQGSKGALVHTPEKTYDIPPAHERRVVDPTGCGDAFRAGLIYGIQHNYDWLTIGRMGNLMGALKLEHPGTQNQRFDFAEFNDQFKQYFGYAL

SEQ ID NO: 609 - DNA, 963 bp, synthetic construct
  misc_feature 1..963: note = Variant of adenosine kinase
  source 1..963: mol_type = other DNA
atgcaccatcatcaccatcacgggggctccggcatgagtgcactgatttgcggttctttagcgtatgataccatcatggtgtttccggaccagttcaagaaccatattctgcccgatcgtgttcaccgcctcaatgtcagctttcttgtaccacgcatgcgtcgtgaatttggaggctgtgccggcaacattgcgtacaatctgcatctgttgggtggtgctccgatcgtaatggctacggtgggccaagatttcggtccgtatcgcgagcacttcgaaactctgggcattgacttatcccgcgtcaagatcatcgatgatctgagtacaccgcaggccttcattaccaccgaccatgatcataaccagattacggcgtttcatccaggcgcaatgatgcgttcgtacgaaaatcacgttcgtgatgtgccgggtgttaccttgggcctcgtaggtcctgatggacgcgagggcatgatccaaaatgccgaagaatttgctgctggtggcattccgttcatttttgacccaggtcaggcactgccgctgttcaacggccccgaactgcgcgagtttatcgaacaggcggactatgtggtggtcaacgattacgaaagcaatcttcttcaaacgcgtactggctggaacgagcaggacattgtttcacgcgtgcaggcgtatatcaccacgcaaggttcgaaaggagccctggtacatacaccggagaagacctacgatattccgccggcacacgaacgtcgtagtgttgatccaactggttgcggcgacgcgtttcgcgccggcctgatctatggtattcagcataattatgattggttgaccattggccgcatgggaaacttaatgggtgcgctgaaagtggaacaccctggcacgcaaaatcagcgtttcgattttgccgaattcaacgaccagttcaaacaatattttggctacgcgctc

SEQ ID NO: 610 - protein, 321 aa, synthetic construct
  REGION 1..321: note = Variant of adenosine kinase
MHHHHHHGGSGMSALICGSLAYDTIMVFPDQFKNHILPDRVHRLNVSFLVPRMRREFGGCAGNIAYNLHLLGGAPIVMATVGQDFGPYREHFETLGIDLSRVKIIDDLSTPQAFITTDHDHNQITAFHPGAMMRSYENHVRDVPGVTLGLVGPDGREGMIQNAEEFAAGGIPFIFDPGQALPLFNGPELREFIEQADYVVVNDYESNLLQTRTGWNEQDIVSRVQAYITTQGSKGALVHTPEKTYDIPPAHERRSVDPTGCGDAFRAGLIYGIQHNYDWLTIGRMGNLMGALKVEHPGTQNQRFDFAEFNDQFKQYFGYAL

SEQ ID NO: 611 - DNA, 963 bp, synthetic construct
  misc_feature 1..963: note = Variant of adenosine kinase
  source 1..963: mol_type = other DNA
atgcaccatcatcaccatcacgggggctccggcatgagtgcactgatttgcggttctttagcgtatgataccatcatggtgtttccggaccagttcaagaaccatattctgcccgatcgtgttcaccgcctcaatgtcagctttcttgtaccacgcatgcgtcgtgaatttggaggctgtgccggcaacattgcgtacaatctgcatctgttgggtggtgctccgatcgtaatggctacggtgggccaagatttcggtccgtatcgcgagcacttcgaaactctgggcattgacttatcccgcgtcaagatcatcgatgatctgagtacaccgcaggccttcattaccaccgaccatgatcataaccagattacggcgtttcatccaggcgcaatgatgcgttcgtacgaaaatcacgttcgtgatgtgccgggtgttaccttgggcctcgtaggtcctgatggacgcgagggcatgatccaaaatgccgaagaatttgctgctggtggcattccgttcatttttgacccaggtcaggcactgccgctgttcaacggccccgaactgcgcgagtttatcgaacaggcggactatgtggtggtctttgattacgaaagcaatcttcttcaagcgcgtactggctggaacgagcaggacattgtttcacgcgtgcaggcgtatatcaccacgcaaggttcgaaaggagccctggtacatacaccggagaagacctacgatattccgccggcacacgaacgtcgtgtcgttgatccaactggttgcggcgacgcgtttcgcgccggcctgatctatggtattcagcataattatgattggttgaccattggccgcatgggaaacttaatgggtgcgctgaaagtggaacaccctggcacgcaaaatcagcgtttcgattttgccgaattcaacgaccagttcaaacaatattttggctacgcgctc

SEQ ID NO: 612 - protein, 321 aa, synthetic construct
  REGION 1..321: note = Variant of adenosine kinase
MHHHHHHGGSGMSALICGSLAYDTIMVFPDQFKNHILPDRVHRLNVSFLVPRMRREFGGCAGNIAYNLHLLGGAPIVMATVGQDFGPYREHFETLGIDLSRVKIIDDLSTPQAFITTDHDHNQITAFHPGAMMRSYENHVRDVPGVTLGLVGPDGREGMIQNAEEFAAGGIPFIFDPGQALPLFNGPELREFIEQADYVVVFDYESNLLQARTGWNEQDIVSRVQAYITTQGSKGALVHTPEKTYDIPPAHERRVVDPTGCGDAFRAGLIYGIQHNYDWLTIGRMGNLMGALKVEHPGTQNQRFDFAEFNDQFKQYFGYAL

SEQ ID NO: 613 - DNA, 963 bp, synthetic construct
  misc_feature 1..963: note = Variant of adenosine kinase
  source 1..963: mol_type = other DNA
atgcaccatcatcaccatcacgggggctccggcatgagtgcactgatttgcggttctttagcgtatgataccatcatggtgtttccggacttgttcaagaaccatattctgcccgatcgtgttcaccgcctcaatgtcagctttcttgtaccacgcatgcgtcgtgaatttggaggctgtgccggcaacattgcgtacaatctgcatctgttgggtggtgctccgatcgtaatggctacggtgggccaagatttcggtccgtatcgcgagcacttcgaaactctgggcattgacttatcccgcgtcaagatcatcgatgatctgagtacaccgcaggccttcattaccaccgaccatgatcataaccagattacggcgtttcatccaggcgcaatgatgcgttcgtacgaaaatcacgttcgtgatgtgccgggtgttaccttgggcctcgtaggtcctgatggacgcgagggcatgatccaaaatgccgaagaatttgctgctggtggcattccgttcatttttgacccaggtcaggcactgccgctgttcaacggccccgaactgcgcgagtttatcgaacaggcggactatgtggtggtcaacgattacgaaagcaatcttcttcaaacgcgtactggctggaacgagcaggacattgtttcacgcgtgcaggcgtatatcaccacgcaaggttcgaaaggagccctggtacatacaccggagaagacctacgatattccgccggcacacgaacgtcgtgtcgttgatccaactggttgcggcgacgcgtttcgcgccggcctgatctatggtattcagcataattatgattggttgaccattggccgcatgggaaacttaatgggtgcgctgaaagtggaacaccctggcacgcaaaatcagcgtttcgattttgccgaattcaacgaccagttcaaacaatattttggctacgcgctc

SEQ ID NO: 614 - protein, 321 aa, synthetic construct
  REGION 1..321: note = Variant of adenosine kinase
MHHHHHHGGSGMSALICGSLAYDTIMVFPDLFKNHILPDRVHRLNVSFLVPRMRREFGGCAGNIAYNLHLLGGAPIVMATVGQDFGPYREHFETLGIDLSRVKIIDDLSTPQAFITTDHDHNQITAFHPGAMMRSYENHVRDVPGVTLGLVGPDGREGMIQNAEEFAAGGIPFIFDPGQALPLFNGPELREFIEQADYVVVNDYESNLLQTRTGWNEQDIVSRVQAYITTQGSKGALVHTPEKTYDIPPAHERRVVDPTGCGDAFRAGLIYGIQHNYDWLTIGRMGNLMGALKVEHPGTQNQRFDFAEFNDQFKQYFGYAL

SEQ ID NO: 615 - DNA, 963 bp, synthetic construct
  misc_feature 1..963: note = Variant of adenosine kinase
  source 1..963: mol_type = other DNA
atgcaccatcatcaccatcacgggggctccggcatgagtgcactgatttgcggttctttagcgtatgataccatcatggtgtttccggaccagttcaagaaccatattctgcccgatcgtgttcaccgcctcaatgtcagctttcttgtaccacgcatgcgtcgtgaatttggaggctgtgccggcaacattgcgtacaatctgcatctgttgggtggtgctccgatcgtaatggctacggtgggccaagatttcggtccgtatcgcgagcacttcgaaactctgggcattgacttatcccgcgtcaagatcatcgatgatctgagtacaccgcaggccttcattaccaccgaccatgatcataaccagattacggcgtttcatgcgggcgcaatgatgcgttcgtacgaaaatcacgttcgtgatgtgccgggtgttaccttgggcctcgtaggtcctgatggacgcgagggcatgatccaaaatgccgaagaatttgctgctggtggcattccgttcatttttgacccaggtcaggcactgccgctgttcaacggccccgaactgcgcgagtttatcgaacaggcggactatgtggtggtcaacgattacgaaagcaatcttcttcaaacgcgtactggctggaacgagcaggacattgtttcacgcgtgcaggcgtatatcaccacgcaaggttcgaaaggagccctggtacatacaccggagaagacctacgatattccgccggcacacgaacgtcgtgtcgttgatccaactggttgcggcgacgcgtttcgcgccggcctgatctatggtattcagcataattatgattggttgaccattggccgcatgggaaacttaatgggtgcgctgaaagtggaacaccctggcacgcaaaatcagcgtttcgattttgccgaattcaacgaccagttcaaacaatattttggctacgcgctc

SEQ ID NO: 616 - protein, 321 aa, synthetic construct
  REGION 1..321: note = Variant of adenosine kinase
MHHHHHHGGSGMSALICGSLAYDTIMVFPDQFKNHILPDRVHRLNVSFLVPRMRREFGGCAGNIAYNLHLLGGAPIVMATVGQDFGPYREHFETLGIDLSRVKIIDDLSTPQAFITTDHDHNQITAFHAGAMMRSYENHVRDVPGVTLGLVGPDGREGMIQNAEEFAAGGIPFIFDPGQALPLFNGPELREFIEQADYVVVNDYESNLLQTRTGWNEQDIVSRVQAYITTQGSKGALVHTPEKTYDIPPAHERRVVDPTGCGDAFRAGLIYGIQHNYDWLTIGRMGNLMGALKVEHPGTQNQRFDFAEFNDQFKQYFGYAL

SEQ ID NO: 617 - DNA, 963 bp, synthetic construct
  misc_feature 1..963: note = Variant of adenosine kinase
  source 1..963: mol_type = other DNA
atgcaccatcatcaccatcacgggggctccggcatgagtgcactgatttgcggttctttagcgtatgataccatcatggtgtttccggaccagttcaagaaccatattctgcccgatcgtgttcaccgcctcaatgtcagctttcttgtaccacgcatgcgtcgtgaatttggaggctgtgccggcaacattgcgtacaatctgcatctgttgggtggtgctccgatcgtaatggctacggtgggccaagatttcggtccgtatcgcgagcacttcgaaactctgggcattgacttatcccgcgtcaagatcatcgatgatctgagtacaccgcaggccttcattaccaccgaccatgatcataaccagattacggcgtttcatccaggcgcaatgatgcgttcgtacgaaaatcacgttcgtgatgtgccgggtgttaccttgggcctcgtaggtcctgatggacgcgagggcatgatccaaaatgccgaagaatttgctgctggtggcattccgttcatttttgacccaggtcaggcactgccgctgttcaacggccccgaactgcgcgagtttatcgaacaggcggactatgtggtggtcaacgattacgaaagcaatcttcttcaaacgcgtactggctggaacgagcaggacattgtttcacgcgtgcaggcgtatatcaccacgcaaggttcgaaaggagccctggtacatacaccggagaagacctacgatattccgccggcacacgttcgtcgtgtcgttgatccaactggttgcggcgacgcgtttcgcgccggcctgatctatggtattcagcataattatgattggttgaccattggccgcatgggaaacttaatgggtgcgctgaaagtggaacaccctggcacgcaaaatcagcgtttcgattttgccgaattcaacgaccagttcaaacaatattttggctacgcgctc

SEQ ID NO: 618 - protein, 321 aa, synthetic construct
  REGION 1..321: note = Variant of adenosine kinase
MHHHHHHGGSGMSALICGSLAYDTIMVFPDQFKNHILPDRVHRLNVSFLVPRMRREFGGCAGNIAYNLHLLGGAPIVMATVGQDFGPYREHFETLGIDLSRVKIIDDLSTPQAFITTDHDHNQITAFHPGAMMRSYENHVRDVPGVTLGLVGPDGREGMIQNAEEFAAGGIPFIFDPGQALPLFNGPELREFIEQADYVVVNDYESNLLQTRTGWNEQDIVSRVQAYITTQGSKGALVHTPEKTYDIPPAHVRRVVDPTGCGDAFRAGLIYGIQHNYDWLTIGRMGNLMGALKVEHPGTQNQRFDFAEFNDQFKQYFGYAL

SEQ ID NO: 619 - DNA, 963 bp, synthetic construct
  misc_feature 1..963: note = Variant of adenosine kinase
  source 1..963: mol_type = other DNA
atgcaccatcatcaccatcacgggggctccggcatgagtgcactgatttgcggttctttagcgtatgataccatcatggcgtttccggaccagttcaagaaccatattctgcccgatcgtgttcaccgcctcaatgtcagctttcttgtaccacgcatgcgtcgtgaatttggaggctgtgccggcaacatggcgtacaatctgcatctgttgggtggtgctccgatcgtaatggctacggtgggccaagatttcggtccgtatcgcgagcacttcgaaactctgggcattgacttatcccgcgtcaagatcatcgatgatctgagtacaccgcaggccttcattaccaccgaccatgatcataaccagattacggcgtttcatccaggcgcaatgatgcgttcgtacgaaaatcacgttcgtgatgtgccgggtgttaccttgggcctcgtaggtcctgatggacgcgagggcatgatccaaaatgccgaagaatttgctgctggtggcattccgttcatttttgacccaggtcaggcactgccgctgttcaacggccccgaactgcgcgagtttatcgaacaggcggactatgtggtggtcaacgattacgaaagcaatcttcttcaaacgcgtactggctggaacgagcaggacattgtttcacgcgtgcaggcgtatatcaccacgcaaggttcgaaaggagccctggtacatacaccggagaagacctacgatattccgccggcacacgaacgtcgtgtcgttgatccaactggttgcggcgacgcgtttcgcgccggcctgatctatggtattcagcataattatgattggttgaccattggccgcatgggaaacttaatgggtgcgctgaaagtggaacaccctggcacgcaaaatcagcgtttcgattttgccgaattcaacgaccagttcaaacaatattttggctacgcgctc

SEQ ID NO: 620 - protein, 321 aa, synthetic construct
  REGION 1..321: note = Variant of adenosine kinase
MHHHHHHGGSGMSALICGSLAYDTIMAFPDQFKNHILPDRVHRLNVSFLVPRMRREFGGCAGNMAYNLHLLGGAPIVMATVGQDFGPYREHFETLGIDLSRVKIIDDLSTPQAFITTDHDHNQITAFHPGAMMRSYENHVRDVPGVTLGLVGPDGREGMIQNAEEFAAGGIPFIFDPGQALPLFNGPELREFIEQADYVVVNDYESNLLQTRTGWNEQDIVSRVQAYITTQGSKGALVHTPEKTYDIPPAHERRVVDPTGCGDAFRAGLIYGIQHNYDWLTIGRMGNLMGALKVEHPGTQNQRFDFAEFNDQFKQYFGYAL

SEQ ID NO: 621 - DNA, 963 bp, synthetic construct
  misc_feature 1..963: note = Variant of adenosine kinase
  source 1..963: mol_type = other DNA
atgcaccatcatcaccatcacgggggctccggcatgagtgcactgatttgcggttctttagcgtatgataccatcatggtgtttccggaccagttcaagaaccatattctgcccgatcgtgttcaccgcctcaatgtcagctttcttgtaccacgcatgcgtcgtgaatttggaggctgtgccggcaacattgcgtacaatctgcatctgttgggtggtgctccgatcgtaatggctacggtgggccaagatttcggtccgtatcgcgagcacttcgaaactctgggcattgacttatcccgcgtcaagatcatcgatgatctgagtacaccgcaggccttcattaccaccgaccatgatcataaccagattacggcgttttggccaggcgcaatgatgcgttcgtacgaaaatcacgttcgtgatgtgccgggtgttaccttgggcctcgtaggtcctgatggacgcgagggcatgatccaaaatgccgaagaatttgctgctggtggcattccgttcatttttgacccaggtcaggcactgccgctgttcaacggccccgaactgcgcgagtttatcgaacaggcggactatgtggtggtcaacgattacgaaagcaatcttcttcaaacgcgtactggctggaacgagcaggacattgtttcacgcgtgcaggcgtatatcaccacgcaaggttcgaaaggagccctggtacatacaccggagaagacctacgatattccgccggcacacgaacgtcgtgtcgttgatccaactggttgcggcgacgcgtttcgcgccggcctgatctatggtattcagcataattatgattggttgaccattggccgcatgggaaacttaatgggtgcgctgaaagtggaacaccctggcacgcaaaatcagcgtttcgattttgccgaattcaacgaccagttcaaacaatattttggctacgcgctc

SEQ ID NO: 622 - protein, 321 aa, synthetic construct
  REGION 1..321: note = Variant of adenosine kinase
MHHHHHHGGSGMSALICGSLAYDTIMVFPDQFKNHILPDRVHRLNVSFLVPRMRREFGGCAGNIAYNLHLLGGAPIVMATVGQDFGPYREHFETLGIDLSRVKIIDDLSTPQAFITTDHDHNQITAFWPGAMMRSYENHVRDVPGVTLGLVGPDGREGMIQNAEEFAAGGIPFIFDPGQALPLFNGPELREFIEQADYVVVNDYESNLLQTRTGWNEQDIVSRVQAYITTQGSKGALVHTPEKTYDIPPAHERRVVDPTGCGDAFRAGLIYGIQHNYDWLTIGRMGNLMGALKVEHPGTQNQRFDFAEFNDQFKQYFGYAL

SEQ ID NO: 623 - DNA, 963 bp, synthetic construct
  misc_feature 1..963: note = Variant of adenosine kinase
  source 1..963: mol_type = other DNA
atgcaccatcatcaccatcacgggggctccggcatgagtgcactgatttgcggttctttagcgtatgataccatcatggtgtttccggaccagttcaagaaccatattctgcccgatcgtgttcaccgcctcaatgtcagctttcttgtaccacgcatgcgtcgtgaatttggaggctgtgccggcaacattgcgtacaatctgcatctgttgggtggtgctccgatcgtaatggctacggtgggccaagatttcggtccgtatcgcgagcacttcgaaactctgggcattgacttatcccgcgtcaagatcatcgatgatctgagtacaccgcaggccttcattaccaccgaccatgatcataaccagattacggcgtttcatccaggcgcaatgatgcgttcgtacgaaaatcacgttcgtgatgtgccgggtgttaccttgggcctcgtaggtcctgatggacgcgagggcatgatccaaaatgccgaagaatttgctgctggtggcattccgttcatttttgacccaggtcaggcactgccgctgttcaacggccccgaactgcgcgagtttatcgaacaggcggactatgtggtggtcaacgattacgaaagcaatcttcttcaaacgcgtactggctggaacgagcaggacattgtttcacgcgtgcaggcgtatatcaccacgcaaggttcgaaaggagccctggtacatacaccggagaagacctacgatattttgccggcacacgaacgtcgtgtcgttgatccaactggttgcggcgacgcgtttcgcgccggcctgatctatggtattcagcataattatgattggttgaccattggccgcatgggaaacttaatgggtgcgctgaaagtggaacaccctggcacgcaaaatcagcgtttcgattttgccgaattcaacgaccagttcaaacaatattttggctacgcgctc

SEQ ID NO: 624 - protein, 321 aa, synthetic construct
  REGION 1..321: note = Variant of adenosine kinase
MHHHHHHGGSGMSALICGSLAYDTIMVFPDQFKNHILPDRVHRLNVSFLVPRMRREFGGCAGNIAYNLHLLGGAPIVMATVGQDFGPYREHFETLGIDLSRVKIIDDLSTPQAFITTDHDHNQITAFHPGAMMRSYENHVRDVPGVTLGLVGPDGREGMIQNAEEFAAGGIPFIFDPGQALPLFNGPELREFIEQADYVVVNDYESNLLQTRTGWNEQDIVSRVQAYITTQGSKGALVHTPEKTYDILPAHERRVVDPTGCGDAFRAGLIYGIQHNYDWLTIGRMGNLMGALKVEHPGTQNQRFDFAEFNDQFKQYFGYAL

SEQ ID NO: 625 - DNA, 963 bp, synthetic construct
  misc_feature 1..963: note = Variant of adenosine kinase
  source 1..963: mol_type = other DNA
atgcaccatcatcaccatcacgggggctccggcatgagtgcactgatttgcggttctttagcgtatgataccatcatggtgtttccggaccagttcaagaaccatattctgcccgatcgtgttcaccgcctcaatgtcagctttcttgtaccacgcatgcgtcgtgaatttggaggctgtgccggcaacattgcgtacaatctgcatctgttgggtggtgctccgatcgtaatggctacggtgggccaagatttcggtccgtatcgcgagcacttcgaaactctgggcattgacttatcccgcgtcaagatcatcgatgatctgagtacaccgcaggccttcattaccaccgaccatgatcataaccagattacggcgtttcatccaggcgcaatgatgcgttcgtacgaaaatcacgttcgtgatgtgccgggtgttaccttgggcctcgtaggtcctgatggacgcgagggcatgatccaaaatgccgaagaatttgctgctggtggcattccgttcatttttgacccaggtcaggcactgccgctgttcaacggccccgaactgcgcgagtttatcgaacaggcggactatgtggtggtcaacgattacgaaagcaatcttcttcaaacgcgtactggctggaacgagcaggacattgtttcacgcgtgcaggcgtatatcaccacgcaaggttcgaaaggagccctggtacatacaccggagaagacctacgatattccgccggcagtggaacgtcgtgtcgttgatccaactggttgcggcgacgcgtttcgcgccggcctgatctatggtattcagcataattatgattggttgaccattggccgcatgggaaacttaatgggtgcgctgaaagtggaacaccctggcacgcaaaatcagcgtttcgattttgccgaattcaacgaccagttcaaacaatattttggctacgcgctc

SEQ ID NO: 626 - protein, 321 aa, synthetic construct
  REGION 1..321: note = Variant of adenosine kinase
MHHHHHHGGSGMSALICGSLAYDTIMVFPDQFKNHILPDRVHRLNVSFLVPRMRREFGGCAGNIAYNLHLLGGAPIVMATVGQDFGPYREHFETLGIDLSRVKIIDDLSTPQAFITTDHDHNQITAFHPGAMMRSYENHVRDVPGVTLGLVGPDGREGMIQNAEEFAAGGIPFIFDPGQALPLFNGPELREFIEQADYVVVNDYESNLLQTRTGWNEQDIVSRVQAYITTQGSKGALVHTPEKTYDIPPAVERRVVDPTGCGDAFRAGLIYGIQHNYDWLTIGRMGNLMGALKVEHPGTQNQRFDFAEFNDQFKQYFGYAL

SEQ ID NO: 627 - DNA, 963 bp, synthetic construct
  misc_feature 1..963: note = Variant of adenosine kinase
  source 1..963: mol_type = other DNA
atgcaccatcatcaccatcacgggggctccggcatgagtgcactgatttgcggttctttagcgtatgataccatcatggtgtttccggaccagttcaagaaccatattctgcccgatcgtgttcaccgcctcaatgtcagctttcttgtaccacgcatgcgtcgtgaatttggaggctgtgccggcaacattgcgtacaatctgcatctgttgggtggtgctccgatcgtaatggctacggtgggccaagatttcggtccgtatcgcgagcacttcgaaactctgggcattgacttatcccgcgtcaagatcatcgatgatctgagtacaccgcaggccttcattaccaccgaccatgatcataaccagattacggcgtttcatccaggcgcaatgatgcgttcgtacgaaaatcacgttcgtgatgtgccgggtgttaccttgggcctcgtaggtcctgatggacgcgagggcatgatccaaaatgccgaagaatttgctgctggtggcattccgttcatttttgacccaggtcaggcactgccgctgttcaacggccccgaactgcgcgagtttatcgaacaggcggactatgtggtggtcaacgattacgaaagcaatcttcttcaaacgcgtactggctggaacgagcaggacattgtttcacgcgtgcaggcgtatatcaccacgcaaggttcggtgggagccctggtacatacaccggagaagacctacgatattccgccggcacacgaacgtcgtgtcgttgatccaactggttgcggcgacgcgtttcgcgccggcctgatctatggtattcagcataattatgattggttgaccattggccgcatgggaaacttaatgggtgcgctgaaagtggaacaccctggcacgcaaaatcagcgtttcgattttgccgaattcaacgaccagttcaaacaatattttggctacgcgctc

SEQ ID NO: 628 - protein, 321 aa, synthetic construct
  REGION 1..321: note = Variant of adenosine kinase
MHHHHHHGGSGMSALICGSLAYDTIMVFPDQFKNHILPDRVHRLNVSFLVPRMRREFGGCAGNIAYNLHLLGGAPIVMATVGQDFGPYREHFETLGIDLSRVKIIDDLSTPQAFITTDHDHNQITAFHPGAMMRSYENHVRDVPGVTLGLVGPDGREGMIQNAEEFAAGGIPFIFDPGQALPLFNGPELREFIEQADYVVVNDYESNLLQTRTGWNEQDIVSRVQAYITTQGSVGALVHTPEKTYDIPPAHERRVVDPTGCGDAFRAGLIYGIQHNYDWLTIGRMGNLMGALKVEHPGTQNQRFDFAEFNDQFKQYFGYAL

SEQ ID NO: 629 - DNA, 963 bp, synthetic construct
  misc_feature 1..963: note = Variant of adenosine kinase
  source 1..963: mol_type = other DNA
atgcaccatcatcaccatcacgggggctccggcatgagtgcactgatttgcggttctttagcgtatgataccatcatggtgtttccggaccagttcaagaaccatattctgcccgatcgtgttcaccgcctcaatgtcagctttcttgtaccacgcatgcgtcgtgaatttggaggctgtgccggcaacattgcgtacaatctgcatctgttgggtggtgctccgatcgtaatggctacggtgggccaagatttcggtccgtatcgcgagcacttcgaaactctgggcattgacttatcccgcgtcaagatcatcgatgatctgagtacaccgcaggccttcattaccaccgaccatgatcataaccagattacggcgtttcatccaggcgcaatgatgcgttcgtacgaaaatcacgttcgtgatgtgccgggtgttaccttgggcctcgtaggtcctgatggacgcgagggcatgatccaaaatgccgaagaatttgctgctggtggcattccgttcatttttgacccaggtcaggcactgccgctgttcaacggccccgaactgcgcgagtttatcgaacaggcggactatgtggtggtcaacgattacgaaagcaatcttcttcaaacgcgtactggctggaacgagcaggacattgtttcacgcgtgcaggcgtatatcaccacgcaaggttcgaaaggagccctggtacatacaccggagaagacctacgatattccgccggcacacgaacgtcgtgtcgttgatccaactggttgcggcgacgcgtttcgcgccggcctgatctatggtattcagcataattatgattggttgaccattggccgcatgggaaacgttatgggtgcgctgaaagtggaacaccctggcacgcaaaatcagcgtttcgattttgccgaattcaacgaccagttcaaacaatattttggctacgcgctc

SEQ ID NO: 630 - protein, 321 aa, synthetic construct
  REGION 1..321: note = Variant of adenosine kinase
MHHHHHHGGSGMSALICGSLAYDTIMVFPDQFKNHILPDRVHRLNVSFLVPRMRREFGGCAGNIAYNLHLLGGAPIVMATVGQDFGPYREHFETLGIDLSRVKIIDDLSTPQAFITTDHDHNQITAFHPGAMMRSYENHVRDVPGVTLGLVGPDGREGMIQNAEEFAAGGIPFIFDPGQALPLFNGPELREFIEQADYVVVNDYESNLLQTRTGWNEQDIVSRVQAYITTQGSKGALVHTPEKTYDIPPAHERRVVDPTGCGDAFRAGLIYGIQHNYDWLTIGRMGNVMGALKVEHPGTQNQRFDFAEFNDQFKQYFGYAL

SEQ ID NO: 631 - DNA, 963 bp, synthetic construct
  misc_feature 1..963: note = Variant of adenosine kinase
  source 1..963: mol_type = other DNA
atgcaccatcatcaccatcacgggggctccggcatgagtgcactgatttgcggttctgttgcgtatgataccatcatggtgtttccggaccagttcaagaaccatattctgcccgatcgtgttcaccgcctcaatgtcagctttcttgtaccacgcatgcgtcgtgaatttggaggctgtgccggcaacattgcgtacaatctgcatctgttgggtggtgctccgatcgtaatggctacggtgggccaagatttcggtccgtatcgcgagcacttcgaaactctgggcattgacttatcccgcgtcaagatcatcgatgatctgagtacaccgcaggccttcattaccaccgaccatgatcataaccagattacggcgtttcatccaggcgcaatgatgcgttcgtacgaaaatcacgttcgtgatgtgccgggtgttaccttgggcctcgtaggtcctgatggacgcgagggcatgatccaaaatgccgaagaatttgctgctggtggcattccgttcatttttgacccaggtcaggcactgccgctgttcaacggccccgaactgcgcgagtttatcgaacaggcggactatgtggtggtcaacgattacgaaagcaatcttcttcaaacgcgtactggctggaacgagcaggacattgtttcacgcgtgcaggcgtatatcaccacgcaaggttcgaaaggagccctggtacatacaccggagaagacctacgatattccgccggcacacgaacgtcgtgtcgttgatccaactggttgcggcgacgcgtttcgcgccggcctgatctatggtattcagcataattatgattggttgaccattggccgcatgggaaacttaatgggtgcgctgaaagtggaacaccctggcacgcaaaatcagcgtttcgattttgccgaattcaacgaccagttcaaacaatattttggctacgcgctc

SEQ ID NO: 632 - protein, 321 aa, synthetic construct
  REGION 1..321: note = Variant of adenosine kinase
MHHHHHHGGSGMSALICGSVAYDTIMVFPDQFKNHILPDRVHRLNVSFLVPRMRREFGGCAGNIAYNLHLLGGAPIVMATVGQDFGPYREHFETLGIDLSRVKIIDDLSTPQAFITTDHDHNQITAFHPGAMMRSYENHVRDVPGVTLGLVGPDGREGMIQNAEEFAAGGIPFIFDPGQALPLFNGPELREFIEQADYVVVNDYESNLLQTRTGWNEQDIVSRVQAYITTQGSKGALVHTPEKTYDIPPAHERRVVDPTGCGDAFRAGLIYGIQHNYDWLTIGRMGNLMGALKVEHPGTQNQRFDFAEFNDQFKQYFGYAL

SEQ ID NO: 633 - DNA, 963 bp, synthetic construct
  misc_feature 1..963: note = Variant of adenosine kinase
  source 1..963: mol_type = other DNA
atgcaccatcatcaccatcacgggggctccggcatgagtgcactgatttgcggttctttagcgtatgataccatcatggtgtttccggaccagttcaagaaccatattctgcccgatcgtgttcaccgcctcaatgtcagctttcttgtaccacgcatgcgtcgtgaatttggaggctgtgccggcaacattgcgtacaatctgcatctgttgggtggtgctccgatcgtaatggctacggtgggccaagatttcggtccgtatcgcgagcacttcgaaactctgggcattgacttatcccgcgtcaagatcatcgatgatctgagtacactgcaggccttcattaccaccgaccatgatcataaccagattacggcgtttcatccaggcgcaatgatgcgttcgtacgaaaatcacgttcgtgatgtgccgggtgttaccttgggcctcgtaggtcctgatggacgcgagggcatgatccaaaatgccgaagaatttgctgctggtggcattccgttcatttttgacccaggtcaggcactgccgctgttcaacggccccgaactgcgcgagtttatcgaacaggcggactatgtggtggtcaacgattacgaaagcaatcttcttcaaacgcgtactggctggaacgagcaggacattgtttcacgcgtgcaggcgtatatcaccacgcaaggttcgaaaggagccctggtacatacaccggagaagacctacgatattccgccggcacacgaacgtcgtgtcgttgatccaactggttgcggcgacgcgtttcgcgccggcctgatctatggtattcagcataattatgattggttgaccattggccgcatgggaaacttaatgggtgcgctgaaagtggaacaccctggcacgcaaaatcagcgtttcgattttgccgaattcaacgaccagttcaaacaatattttggctacgcgctc

SEQ ID NO: 634 - protein, 321 aa, synthetic construct
  REGION 1..321: note = Variant of adenosine kinase
MHHHHHHGGSGMSALICGSLAYDTIMVFPDQFKNHILPDRVHRLNVSFLVPRMRREFGGCAGNIAYNLHLLGGAPIVMATVGQDFGPYREHFETLGIDLSRVKIIDDLSTLQAFITTDHDHNQITAFHPGAMMRSYENHVRDVPGVTLGLVGPDGREGMIQNAEEFAAGGIPFIFDPGQALPLFNGPELREFIEQADYVVVNDYESNLLQTRTGWNEQDIVSRVQAYITTQGSKGALVHTPEKTYDIPPAHERRVVDPTGCGDAFRAGLIYGIQHNYDWLTIGRMGNLMGALKVEHPGTQNQRFDFAEFNDQFKQYFGYAL

SEQ ID NO: 635 - DNA, 963 bp, synthetic construct
  misc_feature 1..963: note = Variant of adenosine kinase
  source 1..963: mol_type = other DNA
atgcaccatcatcaccatcacgggggctccggcatgagtgcactgatttgcggttctttagcgtatgataccatcatggtgtttccggaccagttcaagaaccatattctgcccgatcgtgttcaccgcctcaatgtcagctttcttgtaccacgcatgcgtcgtgaatttggaggctgtgccggcaacattgcgtacaatctgcatctgttgggtggtgctccgatcgtaatggctacggtgggccaagatttcggtccgtatcgcgagcacttcgaaactctgggcattgacttatcccgcgtcaagatcatcgatgatctgagtacaccgcttgccttcattaccaccgaccatgatcataaccagattacggcgtttcatccaggcgcaatgatgcgttcgtacgaaaatcacgttcgtgatgtgccgggtgttaccttgggcctcgtaggtcctgatggacgcgagggcatgatccaaaatgccgaagaatttgctgctggtggcattccgttcatttttgacccaggtcaggcactgccgctgttcaacggccccgaactgcgcgagtttatcgaacaggcggactatgtggtggtcaacgattacgaaagcaatcttcttcaaacgcgtactggctggaacgagcaggacattgtttcacgcgtgcaggcgtatatcaccacgcaaggttcgaaaggagccctggtacatacaccggagaagacctacgatattccgccggcacacgaacgtcgtgtcgttgatccaactggttgcggcgacgcgtttcgcgccggcctgatctatggtattcagcataattatgattggttgaccattggccgcatgggaaacttaatgggtgcgctgaaagtggaacaccctggcacgcaaaatcagcgtttcgattttgccgaattcaacgaccagttcaaacaatattttggctacgcgctc

SEQ ID NO: 636 - protein, 321 aa, synthetic construct
  REGION 1..321: note = Variant of adenosine kinase
MHHHHHHGGSGMSALICGSLAYDTIMVFPDQFKNHILPDRVHRLNVSFLVPRMRREFGGCAGNIAYNLHLLGGAPIVMATVGQDFGPYREHFETLGIDLSRVKIIDDLSTPLAFITTDHDHNQITAFHPGAMMRSYENHVRDVPGVTLGLVGPDGREGMIQNAEEFAAGGIPFIFDPGQALPLFNGPELREFIEQADYVVVNDYESNLLQTRTGWNEQDIVSRVQAYITTQGSKGALVHTPEKTYDIPPAHERRVVDPTGCGDAFRAGLIYGIQHNYDWLTIGRMGNLMGALKVEHPGTQNQRFDFAEFNDQFKQYFGYAL

SEQ ID NO: 637 - DNA, 963 bp, synthetic construct
  misc_feature 1..963: note = Variant of adenosine kinase
  source 1..963: mol_type = other DNA
atgcaccatcatcaccatcacgggggctccggcatgagtgcactgatttgcggttctttagcgtatgataccatcatggtgtttccggaccagttcaagaaccatattctgcccgatcgtgttcaccgcctcaatgtcagctttcttgtaccacgcatgcgtcgtgaatttggaggctgtgccggcaacattgcgtacaatctgcatctgttgggtggtgctccgatcgtaatggctacggtgggccaagatttcggtccgtatcgcgagcacttcgaaactctgggcattgacttatcccgcgtcaagatcatcgatgatctgagtacaccgcaggccttcattaccaccgaccatgatcataaccagattacggcgtttcatccaggcgcaatgatgcgttcgtacgaaaatcacgttcgtgatgtgccgggtgttaccttgggcctcgtaggtcctgatggacgcgagggcatgatccaaaatgccgaagaatttgctgctggtggcattccgttcatttttgacccaggtcaggcatgtccgctgttcaacggccccgaactgcgcgagtttatcgaacaggcggactatgtggtggtcaacgattacgaaagcaatcttcttcaaacgcgtactggctggaacgagcaggacattgtttcacgcgtgcaggcgtatatcaccacgcaaggttcgaaaggagccctggtacatacaccggagaagacctacgatattccgccggcacacgaacgtcgtgtcgttgatccaactggttgcggcgacgcgtttcgcgccggcctgatctatggtattcagcataattatgattggttgaccattggccgcatgggaaacttaatgggtgcgctgaaagtggaacaccctggcacgcaaaatcagcgtttcgattttgccgaattcaacgaccagttcaaacaatattttggctacgcgctc

SEQ ID NO: 638 - protein, 321 aa, synthetic construct
  REGION 1..321: note = Variant of adenosine kinase
MHHHHHHGGSGMSALICGSLAYDTIMVFPDQFKNHILPDRVHRLNVSFLVPRMRREFGGCAGNIAYNLHLLGGAPIVMATVGQDFGPYREHFETLGIDLSRVKIIDDLSTPQAFITTDHDHNQITAFHPGAMMRSYENHVRDVPGVTLGLVGPDGREGMIQNAEEFAAGGIPFIFDPGQACPLFNGPELREFIEQADYVVVNDYESNLLQTRTGWNEQDIVSRVQAYITTQGSKGALVHTPEKTYDIPPAHERRVVDPTGCGDAFRAGLIYGIQHNYDWLTIGRMGNLMGALKVEHPGTQNQRFDFAEFNDQFKQYFGYAL

SEQ ID NO: 639 - DNA, 963 bp, synthetic construct
  misc_feature 1..963: note = Variant of adenosine kinase
  source 1..963: mol_type = other DNA
atgcaccatcatcaccatcacgggggctccggcatgagtgcactgatttgcggttctttagcgtatgataccatcatggtgtttccggaccagttcaagaaccatattctgcccgatcgtgttcaccgcctcaatgtcagctttcttgtaccacgcatgcgtcgtgaatttggaggctgtgccggcaacattgcgtacaatctgcatctgttgggtggtgctccgatcgtaatggctacggtgggccaagatttcggtccgtatcgcgagcacttcgaaactctgggcattgacttatcccgcgtcaagatcatcgatgatctgagtacaccgcaggccttcattaccaccgactgtgatcataaccagattacggcgtttcatccaggcgcaatgatgcgttcgtacgaaaatcacgttcgtgatgtgccgggtgttaccttgggcctcgtaggtcctgatggacgcgagggcatgatccaaaatgccgaagaatttgctgctggtggcattccgttcatttttgacccaggtcaggcactgccgctgttcaacggccccgaactgcgcgagtttatcgaacaggcggactatgtggtggtcaacgattacgaaagcaatcttcttcaaacgcgtactggctggaacgagcaggacattgtttcacgcgtgcaggcgtatatcaccacgcaaggttcgaaaggagccctggtacatacaccggagaagacctacgatattccgccggcacacgaacgtcgtgtcgttgatccaactggttgcggcgacgcgtttcgcgccggcctgatctatggtattcagcataattatgattggttgaccattggccgcatgggaaacttaatgggtgcgctgaaagtggaacaccctggcacgcaaaatcagcgtttcgattttgccgaattcaacgaccagttcaaacaatattttggctacgcgctc

SEQ ID NO: 640 - protein, 321 aa, synthetic construct
  REGION 1..321: note = Variant of adenosine kinase
MHHHHHHGGSGMSALICGSLAYDTIMVFPDQFKNHILPDRVHRLNVSFLVPRMRREFGGCAGNIAYNLHLLGGAPIVMATVGQDFGPYREHFETLGIDLSRVKIIDDLSTPQAFITTDCDHNQITAFHPGAMMRSYENHVRDVPGVTLGLVGPDGREGMIQNAEEFAAGGIPFIFDPGQALPLFNGPELREFIEQADYVVVNDYESNLLQTRTGWNEQDIVSRVQAYITTQGSKGALVHTPEKTYDIPPAHERRVVDPTGCGDAFRAGLIYGIQHNYDWLTIGRMGNLMGALKVEHPGTQNQRFDFAEFNDQFKQYFGYAL

SEQ ID NO: 641 - DNA, 963 bp, synthetic construct
  misc_feature 1..963: note = Variant of adenosine kinase
  source 1..963: mol_type = other DNA
atgcaccatcatcaccatcacgggggctccggcatgagtgcactgatttgcggttctttagcgtatgataccatcatggtgtttccggaccagttcaagaaccatattctgcccgatcgtgttcaccgcctcaatgtcagctttcttgtaccacgcatgcgtcgtgaatttggaggctgtgccggcaacactgcgtacaatctgcatctgttgggtggtgctccgatcgtaatggctacggtgggccaagatttcggtccgtatcgcgagcacttcgaaactctgggcattgacttatcccgcgtcaagatcatcgatgatctgagtacaccgcaggccttcattaccaccgaccatgatcataaccagattacggcgtttcatccaggcgcaatgatgcgttcgtacgaaaatcacgttcgtgatgtgccgggtgttaccttgggcctcgtaggtcctgatggacgcgagggcatgatccaaaatgccgaagaatttgctgctggtggcattccgttcatttttgacccaggtcaggcactgccgctgttcaacggccccgaactgcgcgagtttatcgaacaggcggactatgtggtggtcaacgattacgaaagcaatcttcttcaaacgcgtactggctggaacgagcaggacattgtttcacgcgtgcaggcgtatatcaccacgcaaggttcgaaaggagccctggtacatacaccggagaagacctacgatattccgccggcacacgaacgtcgtgtcgttgatccaactggttgcggcgacgcgtttcgcgccggcctgatctatggtattcagcataattatgattggttgaccattggccgcatgggaaacttaatgggtgcgctgaaagtggaacaccctggcacgcaaaatcagcgtttcgattttgccgaattcaacgaccagttcaaacaatattttggctacgcgctc

SEQ ID NO: 642 - protein, 321 aa, synthetic construct
  REGION 1..321: note = Variant of adenosine kinase
MHHHHHHGGSGMSALICGSLAYDTIMVFPDQFKNHILPDRVHRLNVSFLVPRMRREFGGCAGNTAYNLHLLGGAPIVMATVGQDFGPYREHFETLGIDLSRVKIIDDLSTPQAFITTDHDHNQITAFHPGAMMRSYENHVRDVPGVTLGLVGPDGREGMIQNAEEFAAGGIPFIFDPGQALPLFNGPELREFIEQADYVVVNDYESNLLQTRTGWNEQDIVSRVQAYITTQGSKGALVHTPEKTYDIPPAHERRVVDPTGCGDAFRAGLIYGIQHNYDWLTIGRMGNLMGALKVEHPGTQNQRFDFAEFNDQFKQYFGYAL

SEQ ID NO: 643 - DNA, 963 bp, synthetic construct
  misc_feature 1..963: note = Variant of adenosine kinase
  source 1..963: mol_type = other DNA
atgcaccatcatcaccatcacgggggctccggcatgagtgcactgatttgcggttctttagcgtatgataccatcatggtgtttccggaccagttcaagaaccatattctgcccgatcgtgttcaccgcctcaatgtcagctttcttgtaccacgcatgcgtcgtgaatttggaggctgtgccggcaacattgcgtacaatctgcatctgttgggtggtgctccgatcgtaatggctacggtgggccaagatttcggtccgtatcgcgagcacttcgaaactctgggcattgacttatcccgcgtcaagatcatcgatgatctgagtacaccgcaggccttcattaccaccgaccatgatcataaccagattacggcgtttcatccaggcgcaatgatgcgttcgtacgaaaatcacgttcgtgatgtgccgggtgttaccttgggcctcgtaggtcctgatggacgcgagggcatgatccaaaatgccgaagaatttgctgctggtggcattccgttcatttttgacccaggtcaggcactgccgctgttcaacggccccgaactgcgcgagtttatcgaacaggcggactatgtggtggtcaacgattacgaaagcaatcttcttcaaacgcgtactggctggaacgagcaggacattgtttcacgcgtgcaggcgtatatcaccacgcaaggttcgaaaggagccctggtacatacaccggagaagacctacgatattccgccggcaactgaacgtcgtgtcgttgatccaactggttgcggcgacgcgtttcgcgccggcctgatctatggtattcagcataattatgattggttgaccattggccgcatgggaaacttaatgggtgcgctgaaagtggaacaccctggcacgcaaaatcagcgtttcgattttgccgaattcaacgaccagttcaaacaatattttggctacgcgctc

SEQ ID NO: 644 - protein, 321 aa, synthetic construct
  REGION 1..321: note = Variant of adenosine kinase
MHHHHHHGGSGMSALICGSLAYDTIMVFPDQFKNHILPDRVHRLNVSFLVPRMRREFGGCAGNIAYNLHLLGGAPIVMATVGQDFGPYREHFETLGIDLSRVKIIDDLSTPQAFITTDHDHNQITAFHPGAMMRSYENHVRDVPGVTLGLVGPDGREGMIQNAEEFAAGGIPFIFDPGQALPLFNGPELREFIEQADYVVVNDYESNLLQTRTGWNEQDIVSRVQAYITTQGSKGALVHTPEKTYDIPPATERRVVDPTGCGDAFRAGLIYGIQHNYDWLTIGRMGNLMGALKVEHPGTQNQRFDFAEFNDQFKQYFGYAL

SEQ ID NO: 645 - DNA, 963 bp, synthetic construct
  misc_feature 1..963: note = Variant of adenosine kinase
  source 1..963: mol_type = other DNA
atgcaccatcatcaccatcacgggggctccggcatgagtgcactgatttgcggttctttagcgtatgataccatcatggtgtttccggaccagttcaagaaccatattctgcccgatcgtgttcaccgcctcaatgtcagctttcttgtaccacgcatgcgtcgtgaatttggaggctgtgccggcaacattgcgtacaatctgcatctgttgggtggtgctccgatcgtaatggctacggtgggccaagatttcggtccgtatcgcgagcacttcgaaactctgggcattgacttatcccgcgtcaagatcatcgatgatctgagtacaccgcaggccttcattaccaccgaccatgatcataaccagattacggcgtttcatccaggcgcaatgatgcgttcgtacgaaaatcacgttcgtgatgtgccgggtgttaccttgggcctcgtaggtcctgattggcgcgagggcatgatccaaaatgccgaagaatttgctgctggtggcattccgttcatttttgacccaggtcaggcactgccgctgttcaacggccccgaactgcgcgagtttatcgaacaggcggactatgtggtggtcaacgattacgaaagcaatcttcttcaaacgcgtactggctggaacgagcaggacattgtttcacgcgtgcaggcgtatatcaccacgcaaggttcgaaaggagccctggtacatacaccggagaagacctacgatattccgccggcacacgaacgtcgtgtcgttgatccaactggttgcggcgacgcgtttcgcgccggcctgatctatggtattcagcataattatgattggttgaccattggccgcatgggaaacttaatgggtgcgctgaaagtggaacaccctggcacgcaaaatcagcgtttcgattttgccgaattcaacgaccagttcaaacaatattttggctacgcgctc

SEQ ID NO: 646 - protein, 321 aa, synthetic construct
  REGION 1..321: note = Variant of adenosine kinase
MHHHHHHGGSGMSALICGSLAYDTIMVFPDQFKNHILPDRVHRLNVSFLVPRMRREFGGCAGNIAYNLHLLGGAPIVMATVGQDFGPYREHFETLGIDLSRVKIIDDLSTPQAFITTDHDHNQITAFHPGAMMRSYENHVRDVPGVTLGLVGPDWREGMIQNAEEFAAGGIPFIFDPGQALPLFNGPELREFIEQADYVVVNDYESNLLQTRTGWNEQDIVSRVQAYITTQGSKGALVHTPEKTYDIPPAHERRVVDPTGCGDAFRAGLIYGIQHNYDWLTIGRMGNLMGALKVEHPGTQNQRFDFAEFNDQFKQYFGYAL

SEQ ID NO: 647 - DNA, 963 bp, synthetic construct
  misc_feature 1..963: note = Variant of adenosine kinase
  source 1..963: mol_type = other DNA
atgcaccatcatcaccatcacgggggctccggcatgagtgcactgatttgcggttctttagcgtatgataccatcatggtgtttccggaccagttcaagaaccatattctgcccgatcgtgttcaccgcctcaatgtcagctttcttgtaccacgcatgcgtcgtgaatttggaggctgtgccggcaacattgcgtacaatctgcatctgttgggtggtgctccgatcgtaatggctacggtgggccaagatttcggtccgtatcgcgagcacttcgaaactctgggcattgacttatcccgcgtcaagatcatcgatgatctgagtacaccgcaggccttcattaccaccgaccatgatcataaccagattacggcgtttcatccaggcgcaatgatgcgttcgtacgaaaatcacgttcgtgatgtgccgggtgttaccttgggcctcgtaggtcctgatggacgcgagggcatgatccaaaatgccgaagaatttgctgctggtggcattccgttcatttttgacccaggtcaggcactgccgctgttcaacggccccgaactgcgcgagtttatcgaacaggcggactatgtggtggtcaacgattacgaaagcaatcttcttcaaacgcgtactggctggaacgagcaggacattgtttcacgcgtgcaggcgtatatcaccacgcaaggttcgaaaggagccctggtacatacaccggagaagacctacgatattccgccggcacacgaacgtcgtgtccatgatccaactggttgcggcgacgcgtttcgcgccggcctgatctatggtattcagcataattatgattggttgaccattggccgcatgggaaacttaatgggtgcgctgaaagtggaacaccctggcacgcaaaatcagcgtttcgattttgccgaattcaacgaccagttcaaacaatattttggctacgcgctc

SEQ ID NO: 648 - protein, 321 aa, synthetic construct
  REGION 1..321: note = Variant of adenosine kinase
MHHHHHHGGSGMSALICGSLAYDTIMVFPDQFKNHILPDRVHRLNVSFLVPRMRREFGGCAGNIAYNLHLLGGAPIVMATVGQDFGPYREHFETLGIDLSRVKIIDDLSTPQAFITTDHDHNQITAFHPGAMMRSYENHVRDVPGVTLGLVGPDGREGMIQNAEEFAAGGIPFIFDPGQALPLFNGPELREFIEQADYVVVNDYESNLLQTRTGWNEQDIVSRVQAYITTQGSKGALVHTPEKTYDIPPAHERRVHDPTGCGDAFRAGLIYGIQHNYDWLTIGRMGNLMGALKVEHPGTQNQRFDFAEFNDQFKQYFGYAL

SEQ ID NO: 649 - DNA, 963 bp, synthetic construct
  misc_feature 1..963: note = Variant of adenosine kinase
  source 1..963: mol_type = other DNA
atgcaccatcatcaccatcacgggggctccggcatgagtgcactgatttgcggttctttagcgtatgataccatcatggtgtttccggaccagttcaagaaccatattctgcccgatcgtgttcaccgcctcaatgtcagctttcttgtaccacgcatgcgtcgtgaatttggaggctgtgccggcaacattgcgtacaatctgcatctgttgggtggtgctccgatcgtaatggctacggtgggccaagatttcggtccgtatcgcgagcacttcgaaactctgggcattgacttatcccgcgtcaagatcatcgatgatctgagtacaccgcaggccttcattaccaccgaccatgatcataaccagattacggcgttttttccaggcgcaatgatgcgttcgtacgaaaatcacgttcgtgatgtgccgggtgttaccttgggcctcgtaggtcctgatggacgcgagggcatgatccaaaatgccgaagaatttgctgctggtggcattccgttcatttttgacccaggtcaggcactgccgctgttcaacggccccgaactgcgcgagtttatcgaacaggcggactatgtggtggtcaacgattacgaaagcaatcttcttcaaacgcgtactggctggaacgagcaggacattgtttcacgcgtgcaggcgtatatcaccacgcaaggttcgaaaggagccctggtacatacaccggagaagacctacgatattccgccggcacacgaacgtcgtgtcgttgatccaactggttgcggcgacgcgtttcgcgccggcctgatctatggtattcagcataattatgattggttgaccattggccgcatgggaaacttaatgggtgcgctgaaagtggaacaccctggcacgcaaaatcagcgtttcgattttgccgaattcaacgaccagttcaaacaatattttggctacgcgctc

SEQ ID NO: 650 - protein, 321 aa, synthetic construct
  REGION 1..321: note = Variant of adenosine kinase
MHHHHHHGGSGMSALICGSLAYDTIMVFPDQFKNHILPDRVHRLNVSFLVPRMRREFGGCAGNIAYNLHLLGGAPIVMATVGQDFGPYREHFETLGIDLSRVKIIDDLSTPQAFITTDHDHNQITAFFPGAMMRSYENHVRDVPGVTLGLVGPDGREGMIQNAEEFAAGGIPFIFDPGQALPLFNGPELREFIEQADYVVVNDYESNLLQTRTGWNEQDIVSRVQAYITTQGSKGALVHTPEKTYDIPPAHERRVVDPTGCGDAFRAGLIYGIQHNYDWLTIGRMGNLMGALKVEHPGTQNQRFDFAEFNDQFKQYFGYAL

SEQ ID NO: 651 - DNA, 963 bp, synthetic construct
  misc_feature 1..963: note = Variant of adenosine kinase
  source 1..963: mol_type = other DNA
atgcaccatcatcaccatcacgggggctccggcatgagtgcactgatttgcggttctttagcgtatgataccatcatggtgtttccggaccagttcaagaaccatattctgcccgatcgtgttcaccgcctcaatgtcagctttcttgtaccacgcatgcgtcgtgaatttggaggctgtgccggcaacattgcgtacaatctgcatctgttgggtggtgctccgatcgtaatggctacggtgggccaagatttcggtccgtatcgcgagcacttcgaaactctgggcattgacttatcccgcgtcaagatcatcgatgatctgagtacaccgcaggccttcattaccaccgaccatgatcataaccagattacggcgtttcatccaggcgcaatgatgcgttcgtacgaaaatcacgttcgtgatgtgccgggtgttaccttgggcctcgtaggtcctgatggacgcgagggcatgatccaaaatgccgaagaatttgctgctggtggcattccgttcatttttgacccaggtcaggcactgccgctgttcaacggccccgaactgcgcgagtttatcgaacaggcggactatgtggtggtcaacgattacgaaagcaatcttcttcaaacgcgtactggctggaacgagcaggacattgtttcacgcgtgcaggcgtatatcaccacgcaaggttcgaaaggagccctggtacatacaccggagaagacctacgatattccgccggcacacgaacgtattgtcgttgatccaactggttgcggcgacgcgtttcgcgccggcctgatctatggtattcagcataattatgattggttgaccattggccgcatgggaaacttaatgggtgcgctgaaagtggaacaccctggcacgcaaaatcagcgtttcgattttgccgaattcaacgaccagttcaaacaatattttggctacgcgctc

SEQ ID NO: 652 - protein, 321 aa, synthetic construct
  REGION 1..321: note = Variant of adenosine kinase
MHHHHHHGGSGMSALICGSLAYDTIMVFPDQFKNHILPDRVHRLNVSFLVPRMRREFGGCAGNIAYNLHLLGGAPIVMATVGQDFGPYREHFETLGIDLSRVKIIDDLSTPQAFITTDHDHNQITAFHPGAMMRSYENHVRDVPGVTLGLVGPDGREGMIQNAEEFAAGGIPFIFDPGQALPLFNGPELREFIEQADYVVVNDYESNLLQTRTGWNEQDIVSRVQAYITTQGSKGALVHTPEKTYDIPPAHERIVVDPTGCGDAFRAGLIYGIQHNYDWLTIGRMGNLMGALKVEHPGTQNQRFDFAEFNDQFKQYFGYAL

SEQ ID NO: 653 - DNA, 963 bp, synthetic construct
  misc_feature 1..963: note = Variant of adenosine kinase
  source 1..963: mol_type = other DNA
atgcaccatcatcaccatcacgggggctccggcatgagtgcactgatttgcggttctttagcgtatgataccatcatggtgtttccggaccagttcaagaaccatattctgcccgatcgtgttcaccgcctcaatgtcagctttcttgtaccacgcatgcgtcgtgaatttggaggctgtgccggcaacattgcgtacaatctgcatctgttgggtggtgctccgatcgtaatggctacggtgggccaagatttcggtccgtatcgcgagcacttcgaaactctgggcattgacttatcccgcgtcaagatcatcgatgatctgagtacaccgcaggccttcattaccaccgaccatgatcataaccagattacggcgtttcatccaggcgcaatgatgcgttcgtacgaaaatcacgttcgtgatgtgccgggtgttaccttgggcctcgtaggtcctgatggacgcgagggcatgatccaaaatgccgaagaatttgctgctggtggcattccgttcatttttgacccaggtcaggcactgccgctgttcaacggccccgaactgcgcgagtttatcgaacaggcggactatgtggtggtcaacgattacgaaagcaatcttcttcaaacgcgtactggctggaacgagcaggacattgtttcacgcgtgcaggcgtatatcaccacgcaaggttcgaaaggagccctggtacatacaccggagaagacctacgatattggtccggcacacgaacgtcgtgtcgttgatccaactggttgcggcgacgcgtttcgcgccggcctgatctatggtattcagcataattatgattggttgaccattggccgcatgggaaacttaatgggtgcgctgaaagtggaacaccctggcacgcaaaatcagcgtttcgattttgccgaattcaacgaccagttcaaacaatattttggctacgcgctc

SEQ ID NO: 654 - protein, 321 aa, synthetic construct
  REGION 1..321: note = Variant of adenosine kinase
MHHHHHHGGSGMSALICGSLAYDTIMVFPDQFKNHILPDRVHRLNVSFLVPRMRREFGGCAGNIAYNLHLLGGAPIVMATVGQDFGPYREHFETLGIDLSRVKIIDDLSTPQAFITTDHDHNQITAFHPGAMMRSYENHVRDVPGVTLGLVGPDGREGMIQNAEEFAAGGIPFIFDPGQALPLFNGPELREFIEQADYVVVNDYESNLLQTRTGWNEQDIVSRVQAYITTQGSKGALVHTPEKTYDIGPAHERRVVDPTGCGDAFRAGLIYGIQHNYDWLTIGRMGNLMGALKVEHPGTQNQRFDFAEFNDQFKQYFGYAL

SEQ ID NO: 655 - DNA, 963 bp, synthetic construct
  misc_feature 1..963: note = Variant of adenosine kinase
  source 1..963: mol_type = other DNA
atgcaccatcatcaccatcacgggggctccggcatgagtgcactgatttgcggttctttagcgtatgataccatcatggtgtttccggaccagttcaagaaccatattctgcccgatcgtgttcaccgcctcaatgtcagctttcttgtaccacgcatgcgtcgtgaatttggaggctgtgccggcaacattgcgtacaatctgcatctgttgggtggtgctccgatcgtaatggctacggtgggccaagatttcggtccgtatcgcgagcacttcgaaactctgggcattgacttatcccgcgtcaagatcatcgatgatctgagtacaccgcaggccttcattaccaccgaccatgatcataaccagattacggcgtttcatccaggcgcaatgatgcgttcgtacgaaaatcacgttcgtgatgtgccgggtgttaccttgggcctcgtaggtcctgatggacgcgagggcatgatccaaaatgccgaagaatttgctgctggtggcattccgttcatttttgacccaggtcaggcactgccgctgttcaacggccccgaactgcgcgagtttatcgaacaggcggactatgtggtggtcaacgattacgaaagcaatcttcttcaaacgcgtactggctggaacgagcaggacattgtttcacgcgtgcaggcgtatatcaccacgcaaggttcgaaaggagccctggtacatacaccggagaagacctacgatattccgccggcacacgaacgtcgtgtcgttgatccaactggttgcggcgacgcgtttcgcgccggcctgatctatggtattcagcataattatgattggttgaccattggccgcatgggaaacttaatgggtgcgtttaaagtggaacaccctggcacgcaaaatcagcgtttcgattttgccgaattcaacgaccagttcaaacaatattttggctacgcgctc

SEQ ID NO: 656 - protein, 321 aa, synthetic construct
  REGION 1..321: note = Variant of adenosine kinase
MHHHHHHGGSGMSALICGSLAYDTIMVFPDQFKNHILPDRVHRLNVSFLVPRMRREFGGCAGNIAYNLHLLGGAPIVMATVGQDFGPYREHFETLGIDLSRVKIIDDLSTPQAFITTDHDHNQITAFHPGAMMRSYENHVRDVPGVTLGLVGPDGREGMIQNAEEFAAGGIPFIFDPGQALPLFNGPELREFIEQADYVVVNDYESNLLQTRTGWNEQDIVSRVQAYITTQGSKGALVHTPEKTYDIPPAHERRVVDPTGCGDAFRAGLIYGIQHNYDWLTIGRMGNLMGAFKVEHPGTQNQRFDFAEFNDQFKQYFGYAL

SEQ ID NO: 657 - DNA, 963 bp, synthetic construct
  misc_feature 1..963: note = Variant of adenosine kinase
  source 1..963: mol_type = other DNA
atgcaccatcatcaccatcacgggggctccggcatgagtgcactgatttgcggttctttagcgtatgataccatcatggtgtttccggaccagttcaagaaccatattctgcccgatcgtgttcaccgcctcaatgtcagctttcttgtaccacgcatgcgtcgtgaatttggaggctgtgccggcaacattgcgtacaatctgcatctgttgggtggtgctccgatcgtaatggctacggtgggccaagatttcggtccgtatcgcgagcacttcgaaactctgggcattgacttatcccgcgtcaagatcatcgatgatctgagtacaccgcaggccttcattaccaccgaccatgatcataaccagattacggcgtttcatccaggcgcaatgatgcgttcgtacgaaaatcacgttcgtgatgtgccgggtgttaccttgggcctcgtaggtcctgatggacgcgagggcatgatccaaaatgccgaagaatttgctgctggtggcattccgttcatttttgacccaggtcaggcactgccgctgttcaacggccccgaactgcgcgagtttatcgaacaggcggactatgtggtggtcaacgattacgaaagcaatcttcttcaaacgcgtactggctggaacgagcaggacattgtttcacgcgtgcaggcgtatatcaccacgcaaggttcgaaaggagccctggtacatacaccggagaagacctacgatattccgccggcacactgtcgtcgtgtcgttgatccaactggttgcggcgacgcgtttcgcgccggcctgatctatggtattcagcataattatgattggttgaccattggccgcatgggaaacttaatgggtgcgctgaaagtggaacaccctggcacgcaaaatcagcgtttcgattttgccgaattcaacgaccagttcaaacaatattttggctacgcgctc

SEQ ID NO: 658 - protein, 321 aa, synthetic construct
  REGION 1..321: note = Variant of adenosine kinase
MHHHHHHGGSGMSALICGSLAYDTIMVFPDQFKNHILPDRVHRLNVSFLVPRMRREFGGCAGNIAYNLHLLGGAPIVMATVGQDFGPYREHFETLGIDLSRVKIIDDLSTPQAFITTDHDHNQITAFHPGAMMRSYENHVRDVPGVTLGLVGPDGREGMIQNAEEFAAGGIPFIFDPGQALPLFNGPELREFIEQADYVVVNDYESNLLQTRTGWNEQDIVSRVQAYITTQGSKGALVHTPEKTYDIPPAHCRRVVDPTGCGDAFRAGLIYGIQHNYDWLTIGRMGNLMGALKVEHPGTQNQRFDFAEFNDQFKQYFGYAL

SEQ ID NO: 659 - DNA, 963 bp, synthetic construct
  misc_feature 1..963: note = Variant of adenosine kinase
  source 1..963: mol_type = other DNA
atgcaccatcatcaccatcacgggggctccggcatgagtgcactgatttgcggttctttagcgtatgataccatcatggtgtttccggaccagttcaagaaccatattctgcccgatcgtgttcaccgcctcaatgtcagctttcttgtaccacgcatgcgtcgtgaatttggaggctgtgccggcaacattgcgtacaatctgcatctgttgggtggtgctccgatcgtaatggctacggtgggccaagatttcggtccgtatcgcgagcacttcgaaactctgggcattgacttatcccgcgtcaagatcatcgatgatctgagtacaccgcaggccttcattaccaccgaccatgatcataaccagattacggcgtttcatccaggcgcaatgatgcgttcgtacgaaaatcacgttcgtgatgtgccgggtgttaccttgggcctcgtaggtcctgatggacgcgagggcatgatccaaaatgccgaagaatttgctgctggtggcattccgttcatttttgacccaggtcaggcactgccgctgttcaacggccccgaactgcgcgagtttatcgaacaggcggactatgtggtggtcaacgattacgaaagcaatcttcttcaaacgcgtactggctggaacgagcaggacattgtttcacgcgtgcaggcgtatatcaccacgcaaggttcgaatggagccctggtacatacaccggagaagacctacgatattccgccggcacacgaacgtcgtgtcgttgatccaactggttgcggcgacgcgtttcgcgccggcctgatctatggtattcagcataattatgattggttgaccattggccgcatgggaaacttaatgggtgcgctgaaagtggaacaccctggcacgcaaaatcagcgtttcgattttgccgaattcaacgaccagttcaaacaatattttggctacgcgctc

SEQ ID NO: 660 - protein, 321 aa, synthetic construct
  REGION 1..321: note = Variant of adenosine kinase
MHHHHHHGGSGMSALICGSLAYDTIMVFPDQFKNHILPDRVHRLNVSFLVPRMRREFGGCAGNIAYNLHLLGGAPIVMATVGQDFGPYREHFETLGIDLSRVKIIDDLSTPQAFITTDHDHNQITAFHPGAMMRSYENHVRDVPGVTLGLVGPDGREGMIQNAEEFAAGGIPFIFDPGQALPLFNGPELREFIEQADYVVVNDYESNLLQTRTGWNEQDIVSRVQAYITTQGSNGALVHTPEKTYDIPPAHERRVVDPTGCGDAFRAGLIYGIQHNYDWLTIGRMGNLMGALKVEHPGTQNQRFDFAEFNDQFKQYFGYAL

SEQ ID NO: 661 - DNA, 963 bp, synthetic construct
  misc_feature 1..963: note = Variant of adenosine kinase
  source 1..963: mol_type = other DNA
atgcaccatcatcaccatcacgggggctccggcatgagtgcactgatttgcggttctttagcgtatgataccatcatggtgtttccggaccagttcaagaaccatattctgcccgatcgtgttcaccgcctcaatgtcagctttcttgtaccacgcatgcgtcgtgaatttggaggctgtgccggcaacattgcgtacaatctgcatctgttgggtggtgctccgatcgtaatggctacggtgggccaagatttcggtccgtatcgcgagcacttcgaaactctgggcattgacttatcccgcgtcaagatcatcgatgatctgagtacaccgcaggccttcattaccaccgaccatgatcataaccagattacggcgtttcatccaggcgcaatgatgcgttcgtacgaaaatcacgttcgtgatgtgccgggtgttaccttgggcctcgtaggtcctgatggacgcgagggcatgatccaaaatgccgaagaatttgctgctggtggcattccgttcatttttgacccaggtcaggcagctccgctgttcaacggccccgaactgcgcgagtttatcgaacaggcggactatgtggtggtcaacgattacgaaagcaatcttcttcaaacgcgtactggctggaacgagcaggacattgtttcacgcgtgcaggcgtatatcaccacgcaaggttcgaaaggagccctggtacatacaccggagaagacctacgatattccgccggcacacgaacgtcgtgtcgttgatccaactggttgcggcgacgcgtttcgcgccggcctgatctatggtattcagcataattatgattggttgaccattggccgcatgggaaacttaatgggtgcgctgaaagtggaacaccctggcacgcaaaatcagcgtttcgattttgccgaattcaacgaccagttcaaacaatattttggctacgcgctc

SEQ ID NO: 662 - protein, 321 aa, synthetic construct
  REGION 1..321: note = Variant of adenosine kinase
MHHHHHHGGSGMSALICGSLAYDTIMVFPDQFKNHILPDRVHRLNVSFLVPRMRREFGGCAGNIAYNLHLLGGAPIVMATVGQDFGPYREHFETLGIDLSRVKIIDDLSTPQAFITTDHDHNQITAFHPGAMMRSYENHVRDVPGVTLGLVGPDGREGMIQNAEEFAAGGIPFIFDPGQAAPLFNGPELREFIEQADYVVVNDYESNLLQTRTGWNEQDIVSRVQAYITTQGSKGALVHTPEKTYDIPPAHERRVVDPTGCGDAFRAGLIYGIQHNYDWLTIGRMGNLMGALKVEHPGTQNQRFDFAEFNDQFKQYFGYAL

SEQ ID NO: 663 - DNA, 963 bp, synthetic construct
  misc_feature 1..963: note = Variant of adenosine kinase
  source 1..963: mol_type = other DNA
atgcaccatcatcaccatcacgggggctccggcatgagtgcactgatttgcggttctttagcgtatgataccatcatggtgtttccggactggttcaagaaccatattctgcccgatcgtgttcaccgcctcaatgtcagctttcttgtaccacgcatgcgtcgtgaatttggaggctgtgccggcaacattgcgtacaatctgcatctgttgggtggtgctccgatcgtaatggctacggtgggccaagatttcggtccgtatcgcgagcacttcgaaactctgggcattgacttatcccgcgtcaagatcatcgatgatctgagtacaccgcaggccttcattaccaccgaccatgatcataaccagattacggcgtttcatccaggcgcaatgatgcgttcgtacgaaaatcacgttcgtgatgtgccgggtgttaccttgggcctcgtaggtcctgatggacgcgagggcatgatccaaaatgccgaagaatttgctgctggtggcattccgttcatttttgacccaggtcaggcactgccgctgttcaacggccccgaactgcgcgagtttatcgaacaggcggactatgtggtggtcaacgattacgaaagcaatcttcttcaaacgcgtactggctggaacgagcaggacattgtttcacgcgtgcaggcgtatatcaccacgcaaggttcgaaaggagccctggtacatacaccggagaagacctacgatattccgccggcacacgaacgtcgtgtcgttgatccaactggttgcggcgacgcgtttcgcgccggcctgatctatggtattcagcataattatgattggttgaccattggccgcatgggaaacttaatgggtgcgctgaaagtggaacaccctggcacgcaaaatcagcgtttcgattttgccgaattcaacgaccagttcaaacaatattttggctacgcgctc

SEQ ID NO: 664 - protein, 321 aa, synthetic construct
  REGION 1..321: note = Variant of adenosine kinase
MHHHHHHGGSGMSALICGSLAYDTIMVFPDWFKNHILPDRVHRLNVSFLVPRMRREFGGCAGNIAYNLHLLGGAPIVMATVGQDFGPYREHFETLGIDLSRVKIIDDLSTPQAFITTDHDHNQITAFHPGAMMRSYENHVRDVPGVTLGLVGPDGREGMIQNAEEFAAGGIPFIFDPGQALPLFNGPELREFIEQADYVVVNDYESNLLQTRTGWNEQDIVSRVQAYITTQGSKGALVHTPEKTYDIPPAHERRVVDPTGCGDAFRAGLIYGIQHNYDWLTIGRMGNLMGALKVEHPGTQNQRFDFAEFNDQFKQYFGYAL

SEQ ID NO: 665 - DNA, 963 bp, synthetic construct
  misc_feature 1..963: note = Variant of adenosine kinase
  source 1..963: mol_type = other DNA
atgcaccatcatcaccatcacgggggctccggcatgagtgcactgatttgcggttctttagcgtatgataccatcatggtgtttccggaccagttcaagaaccatattctgcccgatcgtgttcaccgcctcaatgtcagctttcttgtaccacgcatgcgtcgtgaatttggaggctgtgccggcaacattgcgtacaatctgcatctgttgggtggtgctccgatcgtaatggctacggtgggccaagatttcggtccgtatcgcgagcacttcgaaactctgggcattgacttatcccgcgtcaagatcatcgatgatctgagtacaccgcaggccttcattaccaccgaccatgatcataaccagattacggcgtttcatccaggcgcaatgatgcgttcgtacgaaaatcacgttcgtgatgtgccgggtgttaccttgggcctcgtaggtcctgatggacgcgagggcatgatccaaaatgccgaagaatttgctgctggtggcattccgttcatttttgacccaggtcaggcactgccgctgttcaacggccccgaactgcgcgagtttatcgaacaggcggactatgtggtggtcaacgattacgaaagcaatcttcttcaaacgcgtactggctggaacgagcaggacattgtttcacgcgtgcaggcgtatatcaccacgcaaggttcgaaaggagccctggtacatacaccggagaagacctacgatattccgccggcacacgaacgtcgtgtcgttgatccaactggttgcggcgacgcgtatcgcgccggcctgatctatggtattcagcataattatgattggttgaccattggccgcatgggaaacttaatgggtgcgctgaaagtggaacaccctggcacgcaaaatcagcgtttcgattttgccgaattcaacgaccagttcaaacaatattttggctacgcgctc

SEQ ID NO: 666 - protein, 321 aa, synthetic construct
  REGION 1..321: note = Variant of adenosine kinase
MHHHHHHGGSGMSALICGSLAYDTIMVFPDQFKNHILPDRVHRLNVSFLVPRMRREFGGCAGNIAYNLHLLGGAPIVMATVGQDFGPYREHFETLGIDLSRVKIIDDLSTPQAFITTDHDHNQITAFHPGAMMRSYENHVRDVPGVTLGLVGPDGREGMIQNAEEFAAGGIPFIFDPGQALPLFNGPELREFIEQADYVVVNDYESNLLQTRTGWNEQDIVSRVQAYITTQGSKGALVHTPEKTYDIPPAHERRVVDPTGCGDAYRAGLIYGIQHNYDWLTIGRMGNLMGALKVEHPGTQNQRFDFAEFNDQFKQYFGYAL

SEQ ID NO: 667 - DNA, 963 bp, synthetic construct
  misc_feature 1..963: note = Variant of adenosine kinase
  source 1..963: mol_type = other DNA
atgcaccatcatcaccatcacgggggctccggcatgagtgcactgatttgcggttctttagcgtatgataccatcatggtgtttccggaccagttcaagaaccatattctgcccgatcgtgttcaccgcctcaatgtcagctttcttgtaccacgcatgcgtcgtgaatttggaggctgtgccggcaacattgcgtacaatctgcatctgttgggtggtgctccgatcgtaatggctacggtgggccaagatttcggtccgtatcgcgagcacttcgaaactctgggcattgacttatcccgcgtcaagatcatcgatgatctgagtacaccgcaggccttcattaccaccgaccatgatcataaccagattacggcgtttcatccaggcgcaatgatgcgttcgtacgaaaatcacgttcgtgatgtgccgggtgttaccttgggcctcgtaggtcctgatggacgcgagggcatgatccaaaatgccgaagaatttgctgctggtggcattccgttcatttttgacccaggtcaggcactgccgctgttcaacggccccgaactgcgcgagtttatcgaacaggcggactatgtggtggtcaacgattacgaaagcaatcttcttcaaacgcgtactggctggaacgagcaggacattgtttcacgcgtgcaggcgtatatcaccacgcaaggttcgaaaggagccctggtacatacaccggagaagacctacgatattccgccggcattggaacgtcgtgtcgttgatccaactggttgcggcgacgcgtttcgcgccggcctgatctatggtattcagcataattatgattggttgaccattggccgcatgggaaacttaatgggtgcgctgaaagtggaacaccctggcacgcaaaatcagcgtttcgattttgccgaattcaacgaccagttcaaacaatattttggctacgcgctc

SEQ ID NO: 668 - protein, 321 aa, synthetic construct
  REGION 1..321: note = Variant of adenosine kinase
MHHHHHHGGSGMSALICGSLAYDTIMVFPDQFKNHILPDRVHRLNVSFLVPRMRREFGGCAGNIAYNLHLLGGAPIVMATVGQDFGPYREHFETLGIDLSRVKIIDDLSTPQAFITTDHDHNQITAFHPGAMMRSYENHVRDVPGVTLGLVGPDGREGMIQNAEEFAAGGIPFIFDPGQALPLFNGPELREFIEQADYVVVNDYESNLLQTRTGWNEQDIVSRVQAYITTQGSKGALVHTPEKTYDIPPALERRVVDPTGCGDAFRAGLIYGIQHNYDWLTIGRMGNLMGALKVEHPGTQNQRFDFAEFNDQFKQYFGYAL

SEQ ID NO: 669 - DNA, 963 bp, synthetic construct
  misc_feature 1..963: note = Variant of adenosine kinase
  source 1..963: mol_type = other DNA
atgcaccatcatcaccatcacgggggctccggcatgagtgcactgatttgcggttctttagcgtatgataccatcatggtgtttccggaccagttcaagaaccatattctgcccgatcgtgttcaccgcctcaatgtcagctttcttgtaccacgcatgcgtcgtgaatttggaggctgtgccggcaacattgcgtacaatctgcatctgttgggtggtgctccgatcgtaatggctacggtgggccaagatttcggtccgtatcgcgagcacttcgaaactctgggcattgacttatcccgcgtcaagatcatcgatgatctgagtacaccgcaggccttcattaccaccgaccatgatcataaccagattacggcgtttcatccaggcgcaatgatgcgttcgtacgaaaatcacgttcgtgatgtgccgggtgttaccttgggcctcgtagctcctgatggacgcgagggcatgatccaaaatgccgaagaatttgctgctggtggcattccgttcatttttgacccaggtcaggcactgccgctgttcaacggccccgaactgcgcgagtttatcgaacaggcggactatgtggtggtcaacgattacgaaagcaatcttcttcaaacgcgtactggctggaacgagcaggacattgtttcacgcgtgcaggcgtatatcaccacgcaaggttcgaaaggagccctggtacatacaccggagaagacctacgatattccgccggcacacgaacgtcgtgtcgttgatccaactggttgcggcgacgcgtttcgcgccggcctgatctatggtattcagcataattatgattggttgaccattggccgcatgggaaacttaatgggtgcgctgaaagtggaacaccctggcacgcaaaatcagcgtttcgattttgccgaattcaacgaccagttcaaacaatattttggctacgcgctc

SEQ ID NO: 670 - protein, 321 aa, synthetic construct
  REGION 1..321: note = Variant of adenosine kinase
MHHHHHHGGSGMSALICGSLAYDTIMVFPDQFKNHILPDRVHRLNVSFLVPRMRREFGGCAGNIAYNLHLLGGAPIVMATVGQDFGPYREHFETLGIDLSRVKIIDDLSTPQAFITTDHDHNQITAFHPGAMMRSYENHVRDVPGVTLGLVAPDGREGMIQNAEEFAAGGIPFIFDPGQALPLFNGPELREFIEQADYVVVNDYESNLLQTRTGWNEQDIVSRVQAYITTQGSKGALVHTPEKTYDIPPAHERRVVDPTGCGDAFRAGLIYGIQHNYDWLTIGRMGNLMGALKVEHPGTQNQRFDFAEFNDQFKQYFGYAL

SEQ ID NO: 671 - DNA, 963 bp, synthetic construct
  misc_feature 1..963: note = Variant of adenosine kinase
  source 1..963: mol_type = other DNA
atgcaccatcatcaccatcacgggggctccggcatgagtgcactgatttgcggttctttagcgtatgataccatcatggtgtttccggaccagttcaagaaccatattctgcccgatcgtgttcaccgcctcaatgtcagctttcttgtaccacgcatgcgtcgtgaatttggaggctgtgccggcaacattgcgtacaatctgcatctgttgggtggtgctccgatcgtaatggctacggtgggccaagatttcggtccgtatcgcgagcacttcgaaactctgggcattgacttatcccgcgtcaagatcatcgatgatctgagtacaccgcaggccttcattaccaccgaccatgatcataaccagattacggcgtttcatccaggcgcaatgatgcgttcgtacgaaaatcacgttcgtgatgtgccgggtgttaccttgggcctcgtaggtcctgatggacgcgagggcatgatccaaaatgccgaagaatttgctgctggtggcattccgttcatttttgacccaggtcaggcactgccgctgttcaacggccccgaactgcgcgagtttatcgaacaggcggactatgtggtggtcaacgattacgaaagcaatcttcttcaaacgcgtactggctggaacgagcaggacattgtttcacgcgtgcaggcgtatatcaccacgcaaggttcgatgggagccctggtacatacaccggagaagacctacgatattccgccggcacacgaacgtcgtgtcgttgatccaactggttgcggcgacgcgtttcgcgccggcctgatctatggtattcagcataattatgattggttgaccattggccgcatgggaaacttaatgggtgcgctgaaagtggaacaccctggcacgcaaaatcagcgtttcgattttgccgaattcaacgaccagttcaaacaatattttggctacgcgctc

SEQ ID NO: 672 - protein, 321 aa, synthetic construct
  REGION 1..321: note = Variant of adenosine kinase
MHHHHHHGGSGMSALICGSLAYDTIMVFPDQFKNHILPDRVHRLNVSFLVPRMRREFGGCAGNIAYNLHLLGGAPIVMATVGQDFGPYREHFETLGIDLSRVKIIDDLSTPQAFITTDHDHNQITAFHPGAMMRSYENHVRDVPGVTLGLVGPDGREGMIQNAEEFAAGGIPFIFDPGQALPLFNGPELREFIEQADYVVVNDYESNLLQTRTGWNEQDIVSRVQAYITTQGSMGALVHTPEKTYDIPPAHERRVVDPTGCGDAFRAGLIYGIQHNYDWLTIGRMGNLMGALKVEHPGTQNQRFDFAEFNDQFKQYFGYAL

SEQ ID NO: 673 - DNA, 963 bp, synthetic construct
  misc_feature 1..963: note = Variant of adenosine kinase
  source 1..963: mol_type = other DNA
atgcaccatcatcaccatcacgggggctccggcatgagtgcactgatttgcggttctttagcgtatgataccatcatggtgtttccggaccagttcaagaaccatattctgcccgatcgtgttcaccgcctcaatgtcagctttcttgtaccacgcatgcgtcgtgaatttggaggctgtgccggcaacattgcgtacaatctgcatctgttgggtggtgctccgatcgtaatggctacggtgggccaagatttcggtccgtatcgcgagcacttcgaaactctgggcattgacttatcccgcgtcaagatcatcgatgatctgagtacaccgcaggccttcattaccaccgaccatgatcataaccagattacggcgtttcatccaggcgcaatgatgcgttcgtacgaaaatcacgttcgtgatgtgccgggtgttaccttgggcctcgtaggtcctgatggacgcgagggcatgatccaaaatgccgaagaatttgctgctggtggcattccgttcatttttgacgtgggtcaggcactgccgctgttcaacggccccgaactgcgcgagtttatcgaacaggcggactatgtggtggtcaacgattacgaaagcaatcttcttcaaacgcgtactggctggaacgagcaggacattgtttcacgcgtgcaggcgtatatcaccacgcaaggttcgaaaggagccctggtacatacaccggagaagacctacgatattccgccggcacacgaacgtcgtgtcgttgatccaactggttgcggcgacgcgtttcgcgccggcctgatctatggtattcagcataattatgattggttgaccattggccgcatgggaaacttaatgggtgcgctgaaagtggaacaccctggcacgcaaaatcagcgtttcgattttgccgaattcaacgaccagttcaaacaatattttggctacgcgctc

SEQ ID NO: 674 - protein, 321 aa, synthetic construct
  REGION 1..321: note = Variant of adenosine kinase
MHHHHHHGGSGMSALICGSLAYDTIMVFPDQFKNHILPDRVHRLNVSFLVPRMRREFGGCAGNIAYNLHLLGGAPIVMATVGQDFGPYREHFETLGIDLSRVKIIDDLSTPQAFITTDHDHNQITAFHPGAMMRSYENHVRDVPGVTLGLVGPDGREGMIQNAEEFAAGGIPFIFDVGQALPLFNGPELREFIEQADYVVVNDYESNLLQTRTGWNEQDIVSRVQAYITTQGSKGALVHTPEKTYDIPPAHERRVVDPTGCGDAFRAGLIYGIQHNYDWLTIGRMGNLMGALKVEHPGTQNQRFDFAEFNDQFKQYFGYAL

SEQ ID NO: 675 - DNA, 963 bp, synthetic construct
  misc_feature 1..963: note = Variant of adenosine kinase
  source 1..963: mol_type = other DNA
atgcaccatcatcaccatcacgggggctccggcatgagtgcactgatttgcggttctttagcgtatgataccatcatggtgtttccggaccagttcaagaaccatattctgcccgatcgtgttcaccgcctcaatgtcagctttcttgtaccacgcatgcgtcgtgaatttggaggctgtgccggcaacattgcgtacaatctgcatctgttgggtggtgctccgatcgtaatggctacggtgggccaagatttcggtccgtatcgcgagcacttcgaaactctgggcattgacttatcccgcgtcaagatcatcgatgatctgagtacaccgcaggccttcattaccaccgaccatgatcataaccagattacggcgtttcatccaggcgcaatgatgcgttcgtacgaaaatcacgttcgtgatgtgccgggtgttaccttgggcctcgtaggtcctgatggacgcgagggcatgatccaaaatgccgaagaatttgctgctggtggcattccgttcatttttgacccaggtcaggcactgccgctgttcaacggccccgaactgcgcgagtttatcgaacaggcggactatgtggtggtcaacgattacgaaagcaatcttcttcaaacgcgtactggctggaacgagcaggacattgtttcacgcgtgcaggcgtatatcaccacgcaatcttcgaaaggagccctggtacatacaccggagaagacctacgatattccgccggcacacgaacgtcgtgtcgttgatccaactggttgcggcgacgcgtttcgcgccggcctgatctatggtattcagcataattatgattggttgaccattggccgcatgggaaacttaatgggtgcgctgaaagtggaacaccctggcacgcaaaatcagcgtttcgattttgccgaattcaacgaccagttcaaacaatattttggctacgcgctc

SEQ ID NO: 676 - protein, 321 aa, synthetic construct
  REGION 1..321: note = Variant of adenosine kinase
MHHHHHHGGSGMSALICGSLAYDTIMVFPDQFKNHILPDRVHRLNVSFLVPRMRREFGGCAGNIAYNLHLLGGAPIVMATVGQDFGPYREHFETLGIDLSRVKIIDDLSTPQAFITTDHDHNQITAFHPGAMMRSYENHVRDVPGVTLGLVGPDGREGMIQNAEEFAAGGIPFIFDPGQALPLFNGPELREFIEQADYVVVNDYESNLLQTRTGWNEQDIVSRVQAYITTQSSKGALVHTPEKTYDIPPAHERRVVDPTGCGDAFRAGLIYGIQHNYDWLTIGRMGNLMGALKVEHPGTQNQRFDFAEFNDQFKQYFGYAL

SEQ ID NO: 677 - DNA, 963 bp, synthetic construct
  misc_feature 1..963: note = Variant of adenosine kinase
  source 1..963: mol_type = other DNA
atgcaccatcatcaccatcacgggggctccggcatgagtgcactgatttgcggttctttagcgtatgataccatcatggtgtttccggaccagttcaagaaccatattctgcccgatcgtgttcaccgcctcaatgtcagctttcttgtaccacgcatgcgtcgtgaatttggaggctgtgccggcaacattgcgtacaatctgcatctgttgggtggtgctccgatcgtaatggctacggtgggccaagatttcggtccgtatcgcgagcacttcgaaactctgggcattgacttatcccgcgtcaagatcatcgatgatctgagtacaccgcaggccttcattaccaccgaccattgtcataaccagattacggcgtttcatccaggcgcaatgatgcgttcgtacgaaaatcacgttcgtgatgtgccgggtgttaccttgggcctcgtaggtcctgatggacgcgagggcatgatccaaaatgccgaagaatttgctgctggtggcattccgttcatttttgacccaggtcaggcactgccgctgttcaacggccccgaactgcgcgagtttatcgaacaggcggactatgtggtggtcaacgattacgaaagcaatcttcttcaaacgcgtactggctggaacgagcaggacattgtttcacgcgtgcaggcgtatatcaccacgcaaggttcgaaaggagccctggtacatacaccggagaagacctacgatattccgccggcacacgaacgtcgtgtcgttgatccaactggttgcggcgacgcgtttcgcgccggcctgatctatggtattcagcataattatgattggttgaccattggccgcatgggaaacttaatgggtgcgctgaaagtggaacaccctggcacgcaaaatcagcgtttcgattttgccgaattcaacgaccagttcaaacaatattttggctacgcgctc

SEQ ID NO: 678 - protein, 321 aa, synthetic construct
  REGION 1..321: note = Variant of adenosine kinase
MHHHHHHGGSGMSALICGSLAYDTIMVFPDQFKNHILPDRVHRLNVSFLVPRMRREFGGCAGNIAYNLHLLGGAPIVMATVGQDFGPYREHFETLGIDLSRVKIIDDLSTPQAFITTDHCHNQITAFHPGAMMRSYENHVRDVPGVTLGLVGPDGREGMIQNAEEFAAGGIPFIFDPGQALPLFNGPELREFIEQADYVVVNDYESNLLQTRTGWNEQDIVSRVQAYITTQGSKGALVHTPEKTYDIPPAHERRVVDPTGCGDAFRAGLIYGIQHNYDWLTIGRMGNLMGALKVEHPGTQNQRFDFAEFNDQFKQYFGYAL

SEQ ID NO: 679 - DNA, 963 bp, synthetic construct
  misc_feature 1..963: note = Variant of adenosine kinase
  source 1..963: mol_type = other DNA
atgcaccatcatcaccatcacgggggctccggcatgagtgcactgatttgcggttctttagcgtatgataccatcatggtgtttccggactttttcaagaaccatattctgcccgatcgtgttcaccgcctcaatgtcagctttcttgtaccacgcatgcgtcgtgaatttggaggctgtgccggcaacattgcgtacaatctgcatctgttgggtggtgctccgatcgtaatggctacggtgggccaagatttcggtccgtatcgcgagcacttcgaaactctgggcattgacttatcccgcgtcaagatcatcgatgatctgagtacaccgcaggccttcattaccaccgaccatgatcataaccagattacggcgtttcatccaggcgcaatgatgcgttcgtacgaaaatcacgttcgtgatgtgccgggtgttaccttgggcctcgtaggtcctgatggacgcgagggcatgatccaaaatgccgaagaatttgctgctggtggcattccgttcatttttgacccaggtcaggcactgccgctgttcaacggccccgaactgcgcgagtttatcgaacaggcggactatgtggtggtcaacgattacgaaagcaatcttcttcaaacgcgtactggctggaacgagcaggacattgtttcacgcgtgcaggcgtatatcaccacgcaaggttcgaaaggagccctggtacatacaccggagaagacctacgatattccgccggcacacgaacgtcgtgtcgttgatccaactggttgcggcgacgcgtttcgcgccggcctgatctatggtattcagcataattatgattggttgaccattggccgcatgggaaacttaatgggtgcgctgaaagtggaacaccctggcacgcaaaatcagcgtttcgattttgccgaattcaacgaccagttcaaacaatattttggctacgcgctc

SEQ ID NO: 680 - protein, 321 aa, synthetic construct
  REGION 1..321: note = Variant of adenosine kinase
MHHHHHHGGSGMSALICGSLAYDTIMVFPDFFKNHILPDRVHRLNVSFLVPRMRREFGGCAGNIAYNLHLLGGAPIVMATVGQDFGPYREHFETLGIDLSRVKIIDDLSTPQAFITTDHDHNQITAFHPGAMMRSYENHVRDVPGVTLGLVGPDGREGMIQNAEEFAAGGIPFIFDPGQALPLFNGPELREFIEQADYVVVNDYESNLLQTRTGWNEQDIVSRVQAYITTQGSKGALVHTPEKTYDIPPAHERRVVDPTGCGDAFRAGLIYGIQHNYDWLTIGRMGNLMGALKVEHPGTQNQRFDFAEFNDQFKQYFGYAL

SEQ ID NO: 681 - DNA, 963 bp, synthetic construct
  misc_feature 1..963: note = Variant of adenosine kinase
  source 1..963: mol_type = other DNA
atgcaccatcatcaccatcacgggggctccggcatgagtgcactgatttgcggttctttagcgtatgataccatcatggtgtttccggaccagttcaagaaccatattctgcccgatcgtgttcaccgcctcaatgtcagctttcttgtaccacgcatgcgtcgtgaatttggaggctgtgccggcaacattgcgtacaatctgcatctgttgggtggtgctccgatcgtaatggctacggtgggccaagatttcggtccgtatcgcgagcacttcgaaactctgggcattgacttatcccgcgtcaagatcatcgatgatctgagtacaccgcaggccttcattaccaccgaccatgatcataaccagattacggcgtttcatccaggcgcaatgatgcgttcgtacgaaaatcacgttcgtgatgtgccgggtgttaccttgggcctcgtaggtcctgatggacgcgagggcatgatccaaaatgccgaagaatttgctgctggtggcattccgttcatttttgacccaggtcaggcactgccgatgttcaacggccccgaactgcgcgagtttatcgaacaggcggactatgtggtggtcaacgattacgaaagcaatcttcttcaaacgcgtactggctggaacgagcaggacattgtttcacgcgtgcaggcgtatatcaccacgcaaggttcgaaaggagccctggtacatacaccggagaagacctacgatattccgccggcacacgaacgtcgtgtcgttgatccaactggttgcggcgacgcgtttcgcgccggcctgatctatggtattcagcataattatgattggttgaccattggccgcatgggaaacttaatgggtgcgctgaaagtggaacaccctggcacgcaaaatcagcgtttcgattttgccgaattcaacgaccagttcaaacaatattttggctacgcgctc

SEQ ID NO: 682 - protein, 321 aa, synthetic construct
  REGION 1..321: note = Variant of adenosine kinase
MHHHHHHGGSGMSALICGSLAYDTIMVFPDQFKNHILPDRVHRLNVSFLVPRMRREFGGCAGNIAYNLHLLGGAPIVMATVGQDFGPYREHFETLGIDLSRVKIIDDLSTPQAFITTDHDHNQITAFHPGAMMRSYENHVRDVPGVTLGLVGPDGREGMIQNAEEFAAGGIPFIFDPGQALPMFNGPELREFIEQADYVVVNDYESNLLQTRTGWNEQDIVSRVQAYITTQGSKGALVHTPEKTYDIPPAHERRVVDPTGCGDAFRAGLIYGIQHNYDWLTIGRMGNLMGALKVEHPGTQNQRFDFAEFNDQFKQYFGYAL

SEQ ID NO: 683 - DNA, 963 bp, synthetic construct
  misc_feature 1..963: note = Variant of adenosine kinase
  source 1..963: mol_type = other DNA
atgcaccatcatcaccatcacgggggctccggcatgagtgcactgatttgcggttctttagcgtatgataccatcatggtgtttccggaccagttcaagaaccatattctgcccgatcgtgttcaccgcctcaatgtcagctttcttgtaccacgcatgcgtcgtgaatttggaggctgtgccggcaacattgcgtacaatctgcatctgttgggtggtgctccgatcgtaatggctacggtgggccaagatttcggtccgtatcgcgagcacttcgaaactctgggcattgacttatcccgcgtcaagatcatcgatgatctgagtacaccgcaggccttcattaccaccgaccacgatcataaccagattacggcgtttcatccaggcgcaatgatgcgttcgtacgaaaatcacgttcgtgatgtgccgggtgttaccttgggcctcgtaggtcctgatggacgcgagggcatgatccaaaatgccgaagaatttgctgctggtggcattccgttcatttttgacccaggtcaggcactgccgctgttcaacggccccgaactgcgcgagtttatcgaacaggcggactatgtggtggtcaacgattacgaaagcaatcttcttcaaacgcgtactggctggaacgagcaggacattgtttcacgcgtgcaggcgtatatcaccacgcaaggttcggctggagccctggtacatacaccggagaagacctacgatattccgccggctcacacccgtcgtgtcgttgatccaactggttgcggcgacgcgtttcgcgccggcctgatctatggtattcagcataattatgattggttgaccattggccgcatgggaaacttaatgggtgcgctgaaagtggaacaccctggcacgcaaaatcagcgtttcgattttgccgaattcaacgaccagttcaaacaatattttggctacgcgctc

SEQ ID NO: 684 - protein, 321 aa, synthetic construct
  REGION 1..321: note = Variant of adenosine kinase
MHHHHHHGGSGMSALICGSLAYDTIMVFPDQFKNHILPDRVHRLNVSFLVPRMRREFGGCAGNIAYNLHLLGGAPIVMATVGQDFGPYREHFETLGIDLSRVKIIDDLSTPQAFITTDHDHNQITAFHPGAMMRSYENHVRDVPGVTLGLVGPDGREGMIQNAEEFAAGGIPFIFDPGQALPLFNGPELREFIEQADYVVVNDYESNLLQTRTGWNEQDIVSRVQAYITTQGSAGALVHTPEKTYDIPPAHTRRVVDPTGCGDAFRAGLIYGIQHNYDWLTIGRMGNLMGALKVEHPGTQNQRFDFAEFNDQFKQYFGYAL

SEQ ID NO: 685 - DNA, 963 bp, synthetic construct
  misc_feature 1..963: note = Variant of adenosine kinase
  source 1..963: mol_type = other DNA
atgcaccatcatcaccatcacgggggctccggcatgagtgcactgatttgcggttctttagcgtatgataccatcatggtgtttccggaccagttcaagaaccatattctgcccgatcgtgttcaccgcctcaatgtcagctttcttgtaccacgcatgcgtcgtgaatttggaggctgtgccggcaacattgcgtacaatctgcatctgttgggtggtgctccgatcgtaatggctacggtgggccaagatttcggtccgtatcgcgagcacttcgaaactctgggcattgacttatcccgcgtcaagatcatcgatgatctgagtacaccgcaggccttcattaccaccgaccacgatcataaccagattacggcgtttcatccaggcgcaatgatgcgttcgtacgaaaatcacgttcgtgatgtgccgggtgttaccttgggcctcgtaggtcctgatggacgcgagggcatgatccaaaatgccgaagaatttgctgctggtggcattccgttcatttttgacccaggtcaggcagtgccgctgttcaacggccccgaactgcgcgagtttatcgaacaggcggactatgtggtggtcaacgattacgaaagcaatcttcttcaaacgcgtactggctggaacgagcaggacattgtttcacgcgtgcaggcgtatatcaccacgcaaggttcgaaaggagccctggtacatacaccggagaagacctacgatattccgccgattcacacccgtcgtgtcgttgatccaactggttgcggagacgcgtttcgcgccggcctgatctatggtattcagcataattatgattggttgaccattggccgcatgggaaacttaatgggtgcgctgaaagtggaacaccctggcagccaaaatcagcgtttcgattttgccgaattcaacgaccagttcaaacaatattttggctacgcgctc

SEQ ID NO: 686 - protein, 321 aa, synthetic construct
  REGION 1..321: note = Variant of adenosine kinase
MHHHHHHGGSGMSALICGSLAYDTIMVFPDQFKNHILPDRVHRLNVSFLVPRMRREFGGCAGNIAYNLHLLGGAPIVMATVGQDFGPYREHFETLGIDLSRVKIIDDLSTPQAFITTDHDHNQITAFHPGAMMRSYENHVRDVPGVTLGLVGPDGREGMIQNAEEFAAGGIPFIFDPGQAVPLFNGPELREFIEQADYVVVNDYESNLLQTRTGWNEQDIVSRVQAYITTQGSKGALVHTPEKTYDIPPIHTRRVVDPTGCGDAFRAGLIYGIQHNYDWLTIGRMGNLMGALKVEHPGSQNQRFDFAEFNDQFKQYFGYAL

SEQ ID NO: 687 - DNA, 963 bp, synthetic construct
  misc_feature 1..963: note = Variant of adenosine kinase
  source 1..963: mol_type = other DNA
atgcaccatcatcaccatcacgggggctccggcatgagtgcactgatttgcggttctttagcgtatgataccatcatggtgtttccggaccagttcaagaaccatattctgcccgatcgtgttcaccgcctcaatgtcagctttcttgtaccacgcatgcgtcgtgaatttggaggctgtgccggcaacattgcgtacaatctgcatctgttgggtggtgctccgatcgtaatggctacggtgggccaagatttcggtccgtatcgcgagcacttcgaaactctgggcattgacttatcccgcgtcaagatcatcgatgatctgagtacaccgcaggccttcattaccaccgaccgcgatcataaccagattacggcgtttcatccaggcgcaatgatgcgttcgtacgaaaatcacgttcgtgatgtgccgggtgttaccttgggcctcgtaggtcctgatggacgcgagggcatgatccaaaatgccgaagaatttgctgctggtggcattccgttcatttttgacccaggtcaggcagtgccgctgttcaacggccccgaactgcgcgagtttatcgaacaggcggactatgtggtggtcaacgattacgaaagcaatcttcttcaaacgcgtactggctggaacgagcaggacattgtttcacgcgtgcaggcgtatatcaccacgcaaggttcggctggagccctggtacatacaccggagaagacctacgatattccgccgattcacgaacgtcgtgtcgttgatccaactggttgcggcgacgcgtttcgcgccggcctgatctatggtattcagcataattatgattggttgaccattggccgcatgggaaacttaatgggtgcgctgaaagtggaacaccctggcagccaaaatcagcgtttcgattttgccgaattcaacgaccagttcaaacaatattttggctacgcgctc

SEQ ID NO: 688 - protein, 321 aa, synthetic construct
  REGION 1..321: note = Variant of adenosine kinase
MHHHHHHGGSGMSALICGSLAYDTIMVFPDQFKNHILPDRVHRLNVSFLVPRMRREFGGCAGNIAYNLHLLGGAPIVMATVGQDFGPYREHFETLGIDLSRVKIIDDLSTPQAFITTDRDHNQITAFHPGAMMRSYENHVRDVPGVTLGLVGPDGREGMIQNAEEFAAGGIPFIFDPGQAVPLFNGPELREFIEQADYVVVNDYESNLLQTRTGWNEQDIVSRVQAYITTQGSAGALVHTPEKTYDIPPIHERRVVDPTGCGDAFRAGLIYGIQHNYDWLTIGRMGNLMGALKVEHPGSQNQRFDFAEFNDQFKQYFGYAL

SEQ ID NO: 689 - DNA, 963 bp, synthetic construct
  misc_feature 1..963: note = Variant of adenosine kinase
  source 1..963: mol_type = other DNA
atgcaccatcatcaccatcacgggggctccggcatgagtgcactgatttgcggttctttagcgtatgataccatcatggtgtttccggaccagttcaagaaccatattctgcccgatcgtgttcaccgcctcaatgtcagctttcttgtaccacgcatgcgtcgtgaatttggaggctgtgccggcaacattgcgtacaatctgcatctgttgggtggtgctccgatcgtaatggctacggtgggccaagatttcggtccgtatcgcgagcacttcgaaactctgggcattgacttatcccgcgtcaagatcatcgatgatctgagtacaccgcaggccttcattaccaccgaccacgatcataaccagattacggcgtttcatggcggcgcaatgatgcgttcgtacgaaaatcacgttcgtgatgtgccgggtgttaccttgggcctcgtaggtcctgatggacgcgagggcatgatccaaaatgccgaagaatttgctgctggtggcattccgttcatttttgacccaggtcaggcactgccgctgttcaacggccccgaactgcgcgagtttatcgaacaggcggactatgtggtggtcaacgattacgaaagcaatcttcttcaaacgcgtactggctggaacgagcaggacattgtttcacgcgtgcaggcgtatatcaccacgcaaggttcggctggagccctggtacatacaccggagaagacctacgatattccgccggctcacacccgtcgtgtcgttgatccaactggttgcggcgacgcgtttcgcgccggcctgatctatggtattcagcataattatgattggttgaccattggccgcatgggaaacttaatgggtgcgctgaaagtggaacaccctggcacgcaaaatcagcgtttcgattttgccgaattcaacgaccagttcaaacaatattttggctacgcgctc

SEQ ID NO: 690 - protein, 321 aa, synthetic construct
  REGION 1..321: note = Variant of adenosine kinase
MHHHHHHGGSGMSALICGSLAYDTIMVFPDQFKNHILPDRVHRLNVSFLVPRMRREFGGCAGNIAYNLHLLGGAPIVMATVGQDFGPYREHFETLGIDLSRVKIIDDLSTPQAFITTDHDHNQITAFHGGAMMRSYENHVRDVPGVTLGLVGPDGREGMIQNAEEFAAGGIPFIFDPGQALPLFNGPELREFIEQADYVVVNDYESNLLQTRTGWNEQDIVSRVQAYITTQGSAGALVHTPEKTYDIPPAHTRRVVDPTGCGDAFRAGLIYGIQHNYDWLTIGRMGNLMGALKVEHPGTQNQRFDFAEFNDQFKQYFGYAL

SEQ ID NO: 691 - DNA, 963 bp, synthetic construct
  misc_feature 1..963: note = Variant of adenosine kinase
  source 1..963: mol_type = other DNA
atgcaccatcatcaccatcacgggggctccggcatgagtgcactgatttgcggttctttagcgtatgataccatcatggtgtttccggaccagttcaagaaccatattctgcccgatcgtgttcaccgcctcaatgtcagctttcttgtaccacgcatgcgtcgtgaatttggaggctgtgccggcaacattgcgtacaatctgcatctgttgggtggtgctccgatcgtaatggctacggtgggccaagatttcggtccgtatcgcgagcacttcgaaactctgggcattgacttatcccgcgtcaagatcatcgatgatctgagtacaccgcaggccttcattaccaccgacatggatcataaccagattacggcgtttcatggcggcgcaatgatgcgttcgtacgaaaatcacgttcgtgatgtgccgggtgttaccttgggcctcgtaggtcctgatggacgcgagggcatgatccaaaatgccgaagaatttgctgctggtggcattccgttcatttttgacccaggtcaggcactgccgctgttcaacggccccgaactgcgcgagtttatcgaacaggcggactatgtggtggtcaacgattacgaaagcaatcttcttcaaacgcgtactggctggaacgagcaggacattgtttcacgcgtgcaggcgtatatcaccacgcaaggttcggctggagccctggtacatacaccggagaagacctacgatattccgccggcacacgaacgtcgtgtcgttgatccaactggttgcggcgacgcgtttcgcgccggcctgatctatggtattcagcataattatgattggttgaccattggccgcatgggaaacttaatgggtgcgctgaaagtggaacaccctggcacccaaaatcagcgtttcgattttgccgaattcaacgaccagttcaaacaatattttggctacgcgctc

SEQ ID NO: 692 - protein, 321 aa, synthetic construct
  REGION 1..321: note = Variant of adenosine kinase
MHHHHHHGGSGMSALICGSLAYDTIMVFPDQFKNHILPDRVHRLNVSFLVPRMRREFGGCAGNIAYNLHLLGGAPIVMATVGQDFGPYREHFETLGIDLSRVKIIDDLSTPQAFITTDMDHNQITAFHGGAMMRSYENHVRDVPGVTLGLVGPDGREGMIQNAEEFAAGGIPFIFDPGQALPLFNGPELREFIEQADYVVVNDYESNLLQTRTGWNEQDIVSRVQAYITTQGSAGALVHTPEKTYDIPPAHERRVVDPTGCGDAFRAGLIYGIQHNYDWLTIGRMGNLMGALKVEHPGTQNQRFDFAEFNDQFKQYFGYAL

SEQ ID NO: 693 - DNA, 963 bp, synthetic construct
  misc_feature 1..963: note = Variant of adenosine kinase
  source 1..963: mol_type = other DNA
atgcaccatcatcaccatcacgggggctccggcatgagtgcactgatttgcggttctttagcgtatgataccatcatggtgtttccggaccagttcaagaaccatattctgcccgatcgtgttcaccgcctcaatgtcagctttcttgtaccacgcatgcgtcgtgaatttggaggctgtgccggcaacattgcgtacaatctgcatctgttgggtggtgctccgatcgtaatggctacggtgggccaagatttcggtccgtatcgcgagcacttcgaaactctgggcattgacttatcccgcgtcaagatcatcgatgatctgagtacaccgcaggccttcattaccaccgacatggatcataaccagattacggcgtttcatccaggcgcaatgatgcgttcgtacgaaaatcacgttcgtgatgtgccgggtgttaccttgggcctcgtaggtcctgatggacgcgagggcatgatccaaaatgccgaagaatttgctgctggtggcattccgttcatttttgacccaggtcaggcagtgccgctgttcaacggccccgaactgcgcgagtttatcgaacaggcggactatgtggtggtcaacgattacgaaagcaatcttcttcaaacgcgtactggctggaacgagcaggacattgtttcacgcgtgcaggcgtatatcaccacgcaaggttcggctggagccctggtacatacaccggagaagacctacgatattccgccgattcacgaacgtcgtgtgatggatccaactggttgcggcgacgcgtttcgcgccggcctgatctatggtattcagcataattatgattggttgaccattggccgcatgggaaacttaatgggtgcgctgaaagtggaacaccctggcagccaaaatcagcgtttcgattttgccgaattcaacgaccagttcaaacaatattttggctacgcgctc

SEQ ID NO: 694 - protein, 321 aa, synthetic construct
  REGION 1..321: note = Variant of adenosine kinase
MHHHHHHGGSGMSALICGSLAYDTIMVFPDQFKNHILPDRVHRLNVSFLVPRMRREFGGCAGNIAYNLHLLGGAPIVMATVGQDFGPYREHFETLGIDLSRVKIIDDLSTPQAFITTDMDHNQITAFHPGAMMRSYENHVRDVPGVTLGLVGPDGREGMIQNAEEFAAGGIPFIFDPGQAVPLFNGPELREFIEQADYVVVNDYESNLLQTRTGWNEQDIVSRVQAYITTQGSAGALVHTPEKTYDIPPIHERRVMDPTGCGDAFRAGLIYGIQHNYDWLTIGRMGNLMGALKVEHPGSQNQRFDFAEFNDQFKQYFGYAL

SEQ ID NO: 695 - DNA, 963 bp, synthetic construct
  misc_feature 1..963: note = Variant of adenosine kinase
  source 1..963: mol_type = other DNA
atgcaccatcatcaccatcacgggggctccggcatgagtgcactgatttgcggttctttagcgtatgataccatcatggtgtttccggaccagttcaagaaccatattctgcccgatcgtgttcaccgcctcaatgtcagctttcttgtaccacgcatgcgtcgtgaatttggaggctgtgccggcaacattgcgtacaatctgcatctgttgggtggtgctccgatcgtaatggctacggtgggccaagatttcggtccgtatcgcgagcacttcgaaactctgggcattgacttatcccgcgtcaagatcatcgatgatctgagtacaccgcaggccttcattaccaccgaccgcgatcataaccagattacggcgtttcatccaggcgcaatgatgcgttcgtacgaaaatcacgttcgtgatgtgccgggtgttaccttgggcctcgtaggtcctgatggacgcgagggcatgatccaaaatgccgaagaatttgctgctggtggcattccgttcatttttgacccaggtcaggcagtgccgctgttcaacggccccgaactgcgcgagtttatcgaacaggcggactatgtggtggtcaacgattacgaaagcaatcttcttcaaacgcgtactggctggaacgagcaggacattgtttcacgcgtgcaggcgtatatcaccacgcaaggttcgaaaggagccctggtacatacaccggagaagacctacgatattccgccgattcacacccgtcgtgtcgttgatccaactggttgcggcgacgcgtttcgcgccggcctgatctatggtattcagcataattatgattggttgaccattggccgcatgggaaacttaatgggtgcgctgaaagtggaacaccctggcacccaaaatcagcgtttcgattttgccgaattcaacgaccagttcaaacaatattttggctacgcgctc

SEQ ID NO: 696 - protein, 321 aa, synthetic construct
  REGION 1..321: note = Variant of adenosine kinase
MHHHHHHGGSGMSALICGSLAYDTIMVFPDQFKNHILPDRVHRLNVSFLVPRMRREFGGCAGNIAYNLHLLGGAPIVMATVGQDFGPYREHFETLGIDLSRVKIIDDLSTPQAFITTDRDHNQITAFHPGAMMRSYENHVRDVPGVTLGLVGPDGREGMIQNAEEFAAGGIPFIFDPGQAVPLFNGPELREFIEQADYVVVNDYESNLLQTRTGWNEQDIVSRVQAYITTQGSKGALVHTPEKTYDIPPIHTRRVVDPTGCGDAFRAGLIYGIQHNYDWLTIGRMGNLMGALKVEHPGTQNQRFDFAEFNDQFKQYFGYAL

SEQ ID NO: 697 - DNA, 963 bp, synthetic construct
  misc_feature 1..963: note = Variant of adenosine kinase
  source 1..963: mol_type = other DNA
atgcaccatcatcaccatcacgggggctccggcatgagtgcactgatttgcggttctttagcgtatgataccatcatggtgtttccggaccagttcaagaaccatattctgcccgatcgtgttcaccgcctcaatgtcagctttcttgtaccacgcatgcgtcgtgaatttggaggctgtgccggcaacattgcgtacaatctgcatctgttgggtggtgctccgatcgtaatggctacggtgggccaagatttcggtccgtatcgcgagcacttcgaaactctgggcattgacttatcccgcgtcaagatcatcgatgatctgagtacaccgcaggccttcattaccaccgacatggatcataaccagattacggcgtttcatccaggcgcaatgatgcgttcgtacgaaaatcacgttcgtgatgtgccgggtgttaccttgggcctcgtaggtcctgatggacgcgagggcatgatccaaaatgccgaagaatttgctgctggtggcattccgttcatttttgacccaggtcaggcagtgccgctgttcaacggccccgaactgcgcgagtttatcgaacaggcggactatgtggtggtcaacgattacgaaagcaatcttcttcaaacgcgtactggctggaacgagcaggacattgtttcacgcgtgcaggcgtatatcaccacgcaaggttcggctggagccctggtacatacaccggagaagacctacgatattccgccggcacacgaacgtcgtgtcgttgatccaactggttgcggcgacgcgtttcgcgccggcctgatctatggtattcagcataattatgattggttgaccattggccgcatgggaaacttaatgggtgcgctgaaagtggaacaccctggcagccaaaatcagcgtttcgattttgccgaattcaacgaccagttcaaacaatattttggctacgcgctc

SEQ ID NO: 698 - protein, 321 aa, synthetic construct
  REGION 1..321: note = Variant of adenosine kinase
MHHHHHHGGSGMSALICGSLAYDTIMVFPDQFKNHILPDRVHRLNVSFLVPRMRREFGGCAGNIAYNLHLLGGAPIVMATVGQDFGPYREHFETLGIDLSRVKIIDDLSTPQAFITTDMDHNQITAFHPGAMMRSYENHVRDVPGVTLGLVGPDGREGMIQNAEEFAAGGIPFIFDPGQAVPLFNGPELREFIEQADYVVVNDYESNLLQTRTGWNEQDIVSRVQAYITTQGSAGALVHTPEKTYDIPPAHERRVVDPTGCGDAFRAGLIYGIQHNYDWLTIGRMGNLMGALKVEHPGSQNQRFDFAEFNDQFKQYFGYAL

SEQ ID NO: 699 - DNA, 963 bp, synthetic construct
  misc_feature 1..963: note = Variant of adenosine kinase
  source 1..963: mol_type = other DNA
atgcaccatcatcaccatcacgggggctccggcatgagtgcactgatttgcggttctttagcgtatgataccatcatggtgtttccggaccagttcaagaaccatattctgcccgatcgtgttcaccgcctcaatgtcagctttcttgtaccacgcatgcgtcgtgaatttggaggctgtgccggcaacattgcgtacaatctgcatctgttgggtggtgctccgatcgtaatggctacggtgggccaagatttcggtccgtatcgcgagcacttcgaaactctgggcattgacttatcccgcgtcaagatcatcgatgatctgagtacaccgcaggccttcattaccaccgaccacgatcataaccagattacggcgtttcatccaggcgcaatgatgcgttcgtacgaaaatcacgttcgtgatgtgccgggtgttaccttgggcctcgtaggtcctgatggacgcgagggcatgatccaaaatgccgaagaatttgctgctggtggcattccgttcatttttgacccaggtcaggcactgccgctgttcaacggccccgaactgcgcgagtttatcgaacaggcggactatgtggtggtcaacgattacgaaagcaatcttcttcaaacgcgtactggctggaacgagcaggacattgtttcacgcgtgcaggcgtatatcaccacgcaaggttcggctggagccctggtacatacaccggagaagacctacgatattccgccgattcacacccgtcgtgtcgttgatccaactggttgcggcgacgcgtttcgcgccggcctgatctatggtattcagcataattatgattggttgaccattggccgcatgggaaacttaatgggtgcgctgaaagtggaacaccctggcacgcaaaatcagcgtttcgattttgccgaattcaacgaccagttcaaacaatattttggctacgcgctc

SEQ ID NO: 700 - protein, 321 aa, synthetic construct
  REGION 1..321: note = Variant of adenosine kinase
MHHHHHHGGSGMSALICGSLAYDTIMVFPDQFKNHILPDRVHRLNVSFLVPRMRREFGGCAGNIAYNLHLLGGAPIVMATVGQDFGPYREHFETLGIDLSRVKIIDDLSTPQAFITTDHDHNQITAFHPGAMMRSYENHVRDVPGVTLGLVGPDGREGMIQNAEEFAAGGIPFIFDPGQALPLFNGPELREFIEQADYVVVNDYESNLLQTRTGWNEQDIVSRVQAYITTQGSAGALVHTPEKTYDIPPIHTRRVVDPTGCGDAFRAGLIYGIQHNYDWLTIGRMGNLMGALKVEHPGTQNQRFDFAEFNDQFKQYFGYAL

SEQ ID NO: 701 - DNA, 963 bp, synthetic construct
  misc_feature 1..963: note = Variant of adenosine kinase
  source 1..963: mol_type = other DNA
atgcaccatcatcaccatcacgggggctccggcatgagtgcactgatttgcggttctttagcgtatgataccatcatggtgtttccggaccagttcaagaaccatattctgcccgatcgtgttcaccgcctcaatgtcagctttcttgtaccacgcatgcgtcgtgaatttggaggctgtgccggcaacattgcgtacaatctgcatctgttgggtggtgctccgatcgtaatggctacggtgggccaagatttcggtccgtatcgcgagcacttcgaaactctgggcattgacttatcccgcgtcaagatcatcgatgatctgagtacaccgcaggccttcattaccaccgaccgcgatcataaccagattacggcgtttcatccaggcgcaatgatgcgttcgtacgaaaatcacgttcgtgatgtgccgggtgttaccttgggcctcgtaggtcctgatggacgcgagggcatgatccaaaatgccgaagaatttgctgctggtggcattccgttcatttttgacccaggtcaggcagtgccgctgttcaacggccccgaactgcgcgagtttatcgaacaggcggactatgtggtggtcaacgattacgaaagcaatcttcttcaaacgcgtactggctggaacgagcaggacattgtttcacgcgtgcaggcgtatatcaccacgcaaggttcgaaaggagccctggtacatacaccggagaagacctacgatattccgccggctcacacccgtcgtgtcgttgatccaactggttgcggcgacgcgtttcgcgccggcctgatctatggtattcagcataattatgattggttgaccattggccgcatgggaaacttaatgggtgcgctgaaagtggaacaccctggcagccaaaatcagcgtttcgattttgccgaattcaacgaccagttcaaacaatattttggctacgcgctc

SEQ ID NO: 702 - protein, 321 aa, synthetic construct
  REGION 1..321: note = Variant of adenosine kinase
MHHHHHHGGSGMSALICGSLAYDTIMVFPDQFKNHILPDRVHRLNVSFLVPRMRREFGGCAGNIAYNLHLLGGAPIVMATVGQDFGPYREHFETLGIDLSRVKIIDDLSTPQAFITTDRDHNQITAFHPGAMMRSYENHVRDVPGVTLGLVGPDGREGMIQNAEEFAAGGIPFIFDPGQAVPLFNGPELREFIEQADYVVVNDYESNLLQTRTGWNEQDIVSRVQAYITTQGSKGALVHTPEKTYDIPPAHTRRVVDPTGCGDAFRAGLIYGIQHNYDWLTIGRMGNLMGALKVEHPGSQNQRFDFAEFNDQFKQYFGYAL

SEQ ID NO: 703 - DNA, 963 bp, synthetic construct
  misc_feature 1..963: note = Variant of adenosine kinase
  source 1..963: mol_type = other DNA
atgcaccatcatcaccatcacgggggctccggcatgagtgcactgatttgcggttctttagcgtatgataccatcatggtgtttccggaccagttcaagaaccatattctgcccgatcgtgttcaccgcctcaatgtcagctttcttgtaccacgcatgcgtcgtgaatttggaggctgtgccggcaacattgcgtacaatctgcatctgttgggtggtgctccgatcgtaatggctacggtgggccaagatttcggtccgtatcgcgagcacttcgaaactctgggcattgacttatcccgcgtcaagatcatcgatgatctgagtacaccgcaggccttcattaccaccgaccacgatcataaccagattacggcgtttcatggcggcgcaatgatgcgttcgtacgaaaatcacgttcgtgatgtgccgggtgttaccttgggcctcgtaggtcctgatggacgcgagggcatgatccaaaatgccgaagaatttgctgctggtggcattccgttcatttttgacccaggtcaggcagtgccgctgttcaacggccccgaactgcgcgagtttatcgaacaggcggactatgtggtggtcaacgattacgaaagcaatcttcttcaaacgcgtactggctggaacgagcaggacattgtttcacgcgtgcaggcgtatatcaccacgcaaggttcggctggagccctggtacatacaccggagaagacctacgatattccgccggctcacgaacgtcgtgtcgttgatccaactggttgcggcgacgcgtttcgcgccggcctgatctatggtattcagcataattatgattggttgaccattggccgcatgggaaacttaatgggtgcgctgaaagtggaacaccctggcagccaaaatcagcgtttcgattttgccgaattcaacgaccagttcaaacaatattttggctacgcgctc

SEQ ID NO: 704 - protein, 321 aa, synthetic construct
  REGION 1..321: note = Variant of adenosine kinase
MHHHHHHGGSGMSALICGSLAYDTIMVFPDQFKNHILPDRVHRLNVSFLVPRMRREFGGCAGNIAYNLHLLGGAPIVMATVGQDFGPYREHFETLGIDLSRVKIIDDLSTPQAFITTDHDHNQITAFHGGAMMRSYENHVRDVPGVTLGLVGPDGREGMIQNAEEFAAGGIPFIFDPGQAVPLFNGPELREFIEQADYVVVNDYESNLLQTRTGWNEQDIVSRVQAYITTQGSAGALVHTPEKTYDIPPAHERRVVDPTGCGDAFRAGLIYGIQHNYDWLTIGRMGNLMGALKVEHPGSQNQRFDFAEFNDQFKQYFGYAL

SEQ ID NO: 705 - DNA, 963 bp, synthetic construct
  misc_feature 1..963: note = Variant of adenosine kinase
  source 1..963: mol_type = other DNA
atgcaccatcatcaccatcacgggggctccggcatgagtgcactgatttgcggttctctggcgtatgataccatcatggtgtttccggaccagttcaagaaccatattctgcccgatcgtgttcaccgcctcaatgtcagctttcttgtaccacgcatgcgtcgtgggtttggaggctgtgccggcaacattgcgtacaatctgcatctgttgggtggtgctccgatcgtaatggctacggtgggccaagatttcggtccgtatcgcgagcacttcgaaactctgggcattgacttatcccgcgtcaagatcatcgatgatctgagtacaccgcaggccttcattaccaccgaccatgatctgaaccagattacggcgtttcatccaggcgcaatgatgcgttcgtacgaaaatcacgttcgtgatgtgccgggtgttaccttgggcctcgtaggtcctgatggacgcgagggcatgatccaaaatgccgaagaatttgctgctggtggcattccgttcatttttgacccaggtcaggcactgccgctgttcaacggccccgaactgcgcgagtttatcgaacaggcggactatgtggtggtcaacgattacgaaagcaatcttcttcaaacgcgtactggctggaacgagcaggacattgtttcacgcgtgcaggcgtatatcgttacgcaaggttcgaaaggagccctggtacatacaccggagaagacctacgatattccgccggcacacgaacgtcgtgtcgttgatccaactggttgcggcgacgcgtttcgcgccggcctgatctatggtattcagcataattatgattggttgaccattggccgcatgggaaacttaatgggtgcgctgaaagtggaacaccctggcacgcaaaatcagcgtttcgattttgccgaattcaacgaccagttcaaacaatattttggctacgcgctc

SEQ ID NO: 706 - protein, 321 aa, synthetic construct
  REGION 1..321: note = Variant of adenosine kinase
MHHHHHHGGSGMSALICGSLAYDTIMVFPDQFKNHILPDRVHRLNVSFLVPRMRRGFGGCAGNIAYNLHLLGGAPIVMATVGQDFGPYREHFETLGIDLSRVKIIDDLSTPQAFITTDHDLNQITAFHPGAMMRSYENHVRDVPGVTLGLVGPDGREGMIQNAEEFAAGGIPFIFDPGQALPLFNGPELREFIEQADYVVVNDYESNLLQTRTGWNEQDIVSRVQAYIVTQGSKGALVHTPEKTYDIPPAHERRVVDPTGCGDAFRAGLIYGIQHNYDWLTIGRMGNLMGALKVEHPGTQNQRFDFAEFNDQFKQYFGYAL

SEQ ID NO: 707 - DNA, 963 bp, synthetic construct
  misc_feature 1..963: note = Variant of adenosine kinase
  source 1..963: mol_type = other DNA
atgcaccatcatcaccatcacgggggctccggcatgagtgcactgatttgcggttctttagcgtatgataccatcatggtgtttccggaccagttcaagaaccatattctgcccgatcgtgttcaccgcctcaatgtcagctttcttgtaccacgcatgcgtcgtgaatttggaggctgtgccggcaacattgcgtacaatctgcatctgttgggtggtgctccgatcgtaatggctacggtgggccaagatttcggtccgtatcgcgagcacttcgaaactctgggcattgacttatcccgcgtcaagatcatcgatgatctgagtacaccgcaggccttcattaccaccgaccatgatcataaccagattacggcgtttcatccaggcgcaatgatgcgttcgtacgaaaatcacgttcgtgatgtgccgggtgttaccttgggcctcgtaggtcctgatggacgcgagggcatgatccaaaatgccgaagaatttgctgctggtggcattccgttcatttttgacccaggtcaggcagtgccgctgttcaacggccccgaactgcgcgagtttatcgaacaggcggactatgtggtggtcaacgattacgaaagcaatcttcttcaaacgcgtactggctggaacgagcaggacattgtttcacgcgtgcaggcgtatatcaccacgcaaggttcgaaaggagccctggtacatacaccggagaagacctacgatattccgccggcacacgaacgtcgtgcggtggatccaactggttgcggcgacgcgtttcgcgccggcctgatctatggtattcagcataattatgattggttgaccattggccgcatgggaaacttaatgggtgcgctgaaagtggaacaccctggcagccaaaatcagcgtttcgattttgccgaattcaacgaccagttcaaacaatattttggctacgcgctc

SEQ ID NO: 708 - protein, 321 aa, synthetic construct
  REGION 1..321: note = Variant of adenosine kinase
MHHHHHHGGSGMSALICGSLAYDTIMVFPDQFKNHILPDRVHRLNVSFLVPRMRREFGGCAGNIAYNLHLLGGAPIVMATVGQDFGPYREHFETLGIDLSRVKIIDDLSTPQAFITTDHDHNQITAFHPGAMMRSYENHVRDVPGVTLGLVGPDGREGMIQNAEEFAAGGIPFIFDPGQAVPLFNGPELREFIEQADYVVVNDYESNLLQTRTGWNEQDIVSRVQAYITTQGSKGALVHTPEKTYDIPPAHERRAVDPTGCGDAFRAGLIYGIQHNYDWLTIGRMGNLMGALKVEHPGSQNQRFDFAEFNDQFKQYFGYAL

SEQ ID NO: 709 - DNA, 963 bp, synthetic construct
  misc_feature 1..963: note = Variant of adenosine kinase
  source 1..963: mol_type = other DNA
atgcaccatcatcaccatcacgggggctccggcatgagtgcactgatttgcggttctttagcgtatgataccatcatggtgtttccggaccagttcaagaaccatattctgcccgatcgtgttcaccgcctcaatgtcagctttcttgtaccacgcatgcgtcgtgaatttggaggctgtgccggcaacattgcgtacaatctgcatctgttgggtggtgctccgatcgtaatggctacggtgggccaagatttcggtccgtatcgcgagcacttcgaaactctgggcattgacttatcccgcgtcaagatcatcgatgatctgagtacaccgcaggccttcattaccaccgacatggatcataaccagattacggcgtttcatccaggcgcaatgatgcgttcgtacgaaaatcacgttcgtgatgtgccgggtgttaccttgggcctcgtaggtcctgatggacgcgagggcatgatccaaaatgccgaagaatttgctgctggtggcattccgttcatttttgacccaggtcaggcactgccgctgttcaacggccccgaactgcgcgagtttatcgaacaggcggactatgtggtggtcaacgattacgaaagcaatcttcttcaaacgcgtactggctggaacgagcaggacattgtttcacgcgtgcaggcgtatatcaccacgcaaggttcgaaaggagccctggtacatacaccggagaagacctacgatattccgccggcacacgaacgtcgtgtcgttgatccaactggttgcggcgacgcgtttcgcgccggcctgatctatggtattcagcataattatgattggttgaccattggccgcatgggaaacttaatgggtgcgctgaaagtggaacaccctggcagccaaaatcagcgtttcgattttgccgaattcaacgaccagttcaaacaatattttggctacgcgctc

SEQ ID NO: 710 - protein, 321 aa, synthetic construct
  REGION 1..321: note = Variant of adenosine kinase
MHHHHHHGGSGMSALICGSLAYDTIMVFPDQFKNHILPDRVHRLNVSFLVPRMRREFGGCAGNIAYNLHLLGGAPIVMATVGQDFGPYREHFETLGIDLSRVKIIDDLSTPQAFITTDMDHNQITAFHPGAMMRSYENHVRDVPGVTLGLVGPDGREGMIQNAEEFAAGGIPFIFDPGQALPLFNGPELREFIEQADYVVVNDYESNLLQTRTGWNEQDIVSRVQAYITTQGSKGALVHTPEKTYDIPPAHERRVVDPTGCGDAFRAGLIYGIQHNYDWLTIGRMGNLMGALKVEHPGSQNQRFDFAEFNDQFKQYFGYAL

SEQ ID NO: 711 - DNA, 963 bp, synthetic construct
  misc_feature 1..963: note = Variant of adenosine kinase
  source 1..963: mol_type = other DNA
atgcaccatcatcaccatcacgggggctccggcatgagtgcactgatttgcggttctttagcgtatgataccatcatggtgtttccggaccagttcaagaaccatattctgcccgatcgtgttcaccgcctcaatgtcagctttcttgtaccacgcatgcgtcgtgaatttggaggctgtgccggcaacattgcgtacaatctgcatctgttgggtggtgctccgatcgtaatggctacggtgggccaagatttcggtccgtatcgcgagcacttcgaaactctgggcattgacttatcccgcgtcaagatcatcgatgatctgagtacaccgcaggccttcattaccaccgaccgcgatcataaccagattacggcgtttcatccaggcgcaatgatgcgttcgtacgaaaatcacgttcgtgatgtgccgggtgttaccttgggcctcgtaggtcctgatggacgcgagggcatgatccaaaatgccgaagaatttgctgctggtggcattccgttcatttttgacccaggtcaggcactgccgctgttcaacggccccgaactgcgcgagtttatcgaacaggcggactatgtggtggtcaacgattacgaaagcaatcttcttcaaacgcgtactggctggaacgagcaggacattgtttcacgcgtgcaggcgtatatcaccacgcaaggttcgaaaggagccctggtacatacaccggagaagacctacgatattccgccgattcacgaacgtcgtaaggtggatccaactggttgcggcgacgcgtttcgcgccggcctgatctatggtattcagcataattatgattggttgaccattggccgcatgggaaacttaatgggtgcgctgaaagtggaacaccctggcagccaaaatcagcgtttcgattttgccgaattcaacgaccagttcaaacaatattttggctacgcgctc

SEQ ID NO: 712 - protein, 321 aa, synthetic construct
  REGION 1..321: note = Variant of adenosine kinase
MHHHHHHGGSGMSALICGSLAYDTIMVFPDQFKNHILPDRVHRLNVSFLVPRMRREFGGCAGNIAYNLHLLGGAPIVMATVGQDFGPYREHFETLGIDLSRVKIIDDLSTPQAFITTDRDHNQITAFHPGAMMRSYENHVRDVPGVTLGLVGPDGREGMIQNAEEFAAGGIPFIFDPGQALPLFNGPELREFIEQADYVVVNDYESNLLQTRTGWNEQDIVSRVQAYITTQGSKGALVHTPEKTYDIPPIHERRKVDPTGCGDAFRAGLIYGIQHNYDWLTIGRMGNLMGALKVEHPGSQNQRFDFAEFNDQFKQYFGYAL

SEQ ID NO: 713 - DNA, 963 bp, synthetic construct
  misc_feature 1..963: note = Variant of adenosine kinase
  source 1..963: mol_type = other DNA
atgcaccatcatcaccatcacgggggctccggcatgagtgcactgatttgcggttctttagcgtatgataccatcatggtgtttccggaccagttcaagaaccatattctgcccgatcgtgttcaccgcctcaatgtcagctttcttgtaccacgcatgcgtcgtgaatttggaggctgtgccggcaacattgcgtacaatctgcatctgttgggtggtgctccgatcgtaatggctacggtgggccaagatttcggtccgtatcgcgagcacttcgaaactctgggcattgacttatcccgcgtcaagatcatcgatgatctgagtacaccgcaggccttcattaccaccgaccgcgatcataaccagattacggcgtttcatccaggcgcaatgatgcgttcgtacgaaaatcacgttcgtgatgtgccgggtgttaccttgggcctcgtaggtcctgatggacgcgagggcatgatccaaaatgccgaagaatttgctgctggtggcattccgttcatttttgacccaggtcaggcagtgccgctgttcaacggccccgaactgcgcgagtttatcgaacaggcggactatgtggtggtcaacgattacgaaagcaatcttcttcaaacgcgtactggctggaacgagcaggacattgtttcacgcgtgcaggcgtatatcaccacgcaaggttcggctggagccctggtacatacaccggagaagacctacgatattccgccggcacacgaacgtcgtgtggtggatccaactggttgcggcgacgcgtttcgcgccggcctgatctatggtattcagcataattatgattggttgaccattggccgcatgggaaacttaatgggtgcgctgaaagtggaacaccctggcagccaaaatcagcgtttcgattttgccgaattcaacgaccagttcaaacaatattttggctacgcgctc

SEQ ID NO: 714 - protein, 321 aa, synthetic construct
  REGION 1..321: note = Variant of adenosine kinase
MHHHHHHGGSGMSALICGSLAYDTIMVFPDQFKNHILPDRVHRLNVSFLVPRMRREFGGCAGNIAYNLHLLGGAPIVMATVGQDFGPYREHFETLGIDLSRVKIIDDLSTPQAFITTDRDHNQITAFHPGAMMRSYENHVRDVPGVTLGLVGPDGREGMIQNAEEFAAGGIPFIFDPGQAVPLFNGPELREFIEQADYVVVNDYESNLLQTRTGWNEQDIVSRVQAYITTQGSAGALVHTPEKTYDIPPAHERRVVDPTGCGDAFRAGLIYGIQHNYDWLTIGRMGNLMGALKVEHPGSQNQRFDFAEFNDQFKQYFGYAL

SEQ ID NO: 715 - DNA, 963 bp, synthetic construct
  misc_feature 1..963: note = Variant of adenosine kinase
  source 1..963: mol_type = other DNA
atgcaccatcatcaccatcacgggggctccggcatgagtgcactgatttgcggttctttagcgtatgataccatcatggtgtttccggaccagttcaagaaccatattctgcccgatcgtgttcaccgcctcaatgtcagctttcttgtaccacgcatgcgtcgtgaatttggaggctgtgccggcaacattgcgtacaatctgcatctgttgggtggtgctccgatcgtaatggctacggtgggccaagatttcggtccgtatcgcgagcacttcgaaactctgggcattgacttatcccgcgtcaagatcatcgatgatctgagtacaccgcaggccttcattaccaccgaccacgatcataaccagattacggcgtttcatccaggcgcaatgatgcgttcgtacgaaaatcacgttcgtgatgtgccgggtgttaccttgggcctcgtaggtcctgatggacgcgagggcatgatccaaaatgccgaagaatttgctgctggtggcattccgttcatttttgacccaggtcaggcactgccgctgttcaacggccccgaactgcgcgagtttatcgaacaggcggactatgtggtggtcaacgattacgaaagcaatcttcttcaaacgcgtactggctggaacgagcaggacattgtttcacgcgtgcaggcgtatatcaccacgcaaggttcgaaaggagccctggtacatacaccggagaagacctacgatattccgccggctcacacccgtcgtgtcgttgatccaactggttgcggcgacgcgtttcgcgccggcctgatctatggtattcagcataattatgattggttgaccattggccgcatgggaaacttaatgggtgcgctgaaagtggaacaccctggcacgcaaaatcagcgtttcgattttgccgaattcaacgaccagttcaaacaatattttggctacgcgctc

SEQ ID NO: 716 - protein, 321 aa, synthetic construct
  REGION 1..321: note = Variant of adenosine kinase
MHHHHHHGGSGMSALICGSLAYDTIMVFPDQFKNHILPDRVHRLNVSFLVPRMRREFGGCAGNIAYNLHLLGGAPIVMATVGQDFGPYREHFETLGIDLSRVKIIDDLSTPQAFITTDHDHNQITAFHPGAMMRSYENHVRDVPGVTLGLVGPDGREGMIQNAEEFAAGGIPFIFDPGQALPLFNGPELREFIEQADYVVVNDYESNLLQTRTGWNEQDIVSRVQAYITTQGSKGALVHTPEKTYDIPPAHTRRVVDPTGCGDAFRAGLIYGIQHNYDWLTIGRMGNLMGALKVEHPGTQNQRFDFAEFNDQFKQYFGYAL

SEQ ID NO: 717 - DNA, 963 bp, synthetic construct
  misc_feature 1..963: note = Variant of adenosine kinase
  source 1..963: mol_type = other DNA
atgcaccatcatcaccatcacgggggctccggcatgagtgcactgatttgcggttctttagcgtatgataccatcatggtgtttccggaccagttcaagaaccatattctgcccgatcgtgttcaccgcctcaatgtcagctttcttgtaccacgcatgcgtcgtgaatttggaggctgtgccggcaacattgcgtacaatctgcatctgttgggtggtgctccgatcgtaatggctatggtgggccaagatttcggtccgtatcgcgagcacttcgaaactctgggcattgacttatcccgcgtcaagatcatcgatgatctgagtacaccgcaggccttcattaccaccgacatggatcataaccagattacggcgtttcatccaggcgcaatgatgcgttcgtacgaaaatcacgttcgtgatgtgccgggtgttaccttgggcctcgtaggtcctgatggacgcgagggcatgatccaaaatgccgaagaatttgctgctggtggcattccgttcatttttgacccaggtcaggcactgccgctgttcaacggccccgaactgcgcgagtttatcgaacaggcggactatgtggtggtcaacgattacgaaagcaatcttcttcaaacgcgtactggctggaacgagcaggacattgtttcacgcgtgcaggcgtatatcaccacgcaaggttcgaaaggagccctggtacatacaccggagaagacctacgatattccgccggctcacacccgtcgtgtcgttgatccaactggttgcggcgacgcgtttcgcgccggcctgatctatggtattcagcataattatgattggttgaccattggccgcatgggaaacttaatgggtgcgctgaaagtggaacaccctggcacgcaaaatcagcgtttcgattttgccgaattcaacgaccagttcaaacaatattttggctacgcgctc

SEQ ID NO: 718 - protein, 321 aa, synthetic construct
  REGION 1..321: note = Variant of adenosine kinase
MHHHHHHGGSGMSALICGSLAYDTIMVFPDQFKNHILPDRVHRLNVSFLVPRMRREFGGCAGNIAYNLHLLGGAPIVMAMVGQDFGPYREHFETLGIDLSRVKIIDDLSTPQAFITTDMDHNQITAFHPGAMMRSYENHVRDVPGVTLGLVGPDGREGMIQNAEEFAAGGIPFIFDPGQALPLFNGPELREFIEQADYVVVNDYESNLLQTRTGWNEQDIVSRVQAYITTQGSKGALVHTPEKTYDIPPAHTRRVVDPTGCGDAFRAGLIYGIQHNYDWLTIGRMGNLMGALKVEHPGTQNQRFDFAEFNDQFKQYFGYAL

SEQ ID NO: 719 - DNA, 963 bp, synthetic construct
  misc_feature 1..963: note = Variant of adenosine kinase
  source 1..963: mol_type = other DNA
atgcaccatcatcaccatcacgggggctccggcatgagtgcactgatttgcggttctttagcgtatgataccatcatggtgtttccggaccagttcaagaaccatattctgcccgatcgtgttcaccgcctcaatgtcagctttcttgtaccacgcatgcgtcgtgaatttggaggctgtgccggcaacattgcgtacaatctgcatctgttgggtggtgctccgatcgtaatggctacggtgggccaagatttcggtccgtatcgcgagcacttcgaaactctgggcattgacttatcccgcgtcaagatcatcgatgatctgagtacaccgcaggccttcattaccaccgacatggatcataaccagattacggcgtttcatggcggcgcaatgatgcgttcgtacgaaaatcacgttcgtgatgtgccgggtgttaccttgggcctcgtaggtcctgatggacgcgagggcatgatccaaaatgccgaagaatttgctgctggtggcattccgttcatttttgacccaggtcaggcactgccgctgttcaacggccccgaactgcgcgagtttatcgaacaggcggactatgtggtggtcaacgattacgaaagcaatcttcttcaaacgcgtactggctggaacgagcaggacattgtttcacgcgtgcaggcgtatatcaccacgcaaggttcgaaaggagccctggtacatacaccggagaagacctacgatattccgccggcacacgaacgtcgtgtcgttgatccaactggttgcggcgacgcgtttcgcgccggcctgatctatggtattcagcataattatgattggttgaccattggccgcatgggaaacttaatgggtgcgctgaaagtggaacaccctggcacgcaaaatcagcgtttcgattttgccgaattcaacgaccagttcaaacaatattttggctacgcgctc

SEQ ID NO: 720 - protein, 321 aa, synthetic construct
  REGION 1..321: note = Variant of adenosine kinase
MHHHHHHGGSGMSALICGSLAYDTIMVFPDQFKNHILPDRVHRLNVSFLVPRMRREFGGCAGNIAYNLHLLGGAPIVMATVGQDFGPYREHFETLGIDLSRVKIIDDLSTPQAFITTDMDHNQITAFHGGAMMRSYENHVRDVPGVTLGLVGPDGREGMIQNAEEFAAGGIPFIFDPGQALPLFNGPELREFIEQADYVVVNDYESNLLQTRTGWNEQDIVSRVQAYITTQGSKGALVHTPEKTYDIPPAHERRVVDPTGCGDAFRAGLIYGIQHNYDWLTIGRMGNLMGALKVEHPGTQNQRFDFAEFNDQFKQYFGYAL

SEQ ID NO: 721 - DNA, 963 bp, synthetic construct
  misc_feature 1..963: note = Variant of adenosine kinase
  source 1..963: mol_type = other DNA
atgcaccatcatcaccatcacgggggctccggcatgagtgcactgatttgcggttctttagcgtatgataccatcatggtgtttccggaccagttcaagaaccatattctgcccgatcgtgttcaccgcctcaatgtcagctttcttgtaccacgcatgcgtcgtgaatttggaggctgtgccggcaacattgcgtacaatctgcatctgttgggtggtgctccgatcgtaatggctacggtgggccaagatttcggtccgtatcgcgagcacttcgaaactctgggcattgacttatcccgcgtcaagatcatcgatgatctgagtacaccgcaggccttcattaccaccgacatggatcataaccagattacggcgtttcatggcggcgcaatgatgcgttcgtacgaaaatcacgttcgtgatgtgccgggtgttaccttgggcctcgtaggtcctgatggacgcgagggcatgatccaaaatgccgaagaatttgctgctggtggcattccgttcatttttgacccaggtcaggcactgccgctgttcaacggccccgaactgcgcgagtttatcgaacaggcggactatgtggtggtcaacgattacgaaagcaatcttcttcaaacgcgtactggctggaacgagcaggacattgtttcacgcgtgcaggcgtatatcaccacgcaaggttcgaaaggagccctggtacatacaccggagaagacctacgatattccgccgattcacgaacgtcgtgtcgttgatccaactggttgcggcgacgcgtttcgcgccggcctgatctatggtattcagcataattatgattggttgaccattggccgcatgggaaacttaatgggtgcgctgaaagtggaacaccctggcacccaaaatcagcgtttcgattttgccgaattcaacgaccagttcaaacaatattttggctacgcgctc

SEQ ID NO: 722 - protein, 321 aa, synthetic construct
  REGION 1..321: note = Variant of adenosine kinase
MHHHHHHGGSGMSALICGSLAYDTIMVFPDQFKNHILPDRVHRLNVSFLVPRMRREFGGCAGNIAYNLHLLGGAPIVMATVGQDFGPYREHFETLGIDLSRVKIIDDLSTPQAFITTDMDHNQITAFHGGAMMRSYENHVRDVPGVTLGLVGPDGREGMIQNAEEFAAGGIPFIFDPGQALPLFNGPELREFIEQADYVVVNDYESNLLQTRTGWNEQDIVSRVQAYITTQGSKGALVHTPEKTYDIPPIHERRVVDPTGCGDAFRAGLIYGIQHNYDWLTIGRMGNLMGALKVEHPGTQNQRFDFAEFNDQFKQYFGYAL

SEQ ID NO: 723 - DNA, 963 bp, synthetic construct
  misc_feature 1..963: note = Variant of adenosine kinase
  source 1..963: mol_type = other DNA
atgcaccatcatcaccatcacgggggctccggcatgagtgcactgatttgcggttctttagcgtatgataccatcatggtgtttccggaccagttcaagaaccatattctgcccgatcgtgttcaccgcctcaatgtcagctttcttgtaccacgcatgcgtcgtgaatttggaggctgtgccggcaacattgcgtacaatctgcatctgttgggtggtgctccgatcgtaatggctacggtgggccaagatttcggtccgtatcgcgagcacttcgaaactctgggcattgacttatcccgcgtcaagatcatcgatgatctgagtacaccgcaggccttcattaccaccgaccacgatcataaccagattacggcgtttcatccaggcgcaatgatgcgttcgtacgaaaatcacgttcgtgatgtgccgggtgttaccttgggcctcgtaggtcctgatggacgcgagggcatgatccaaaatgccgaagaatttgctgctggtggcattccgttcatttttgacccaggtcaggcagtgccgctgttcaacggccccgaactgcgcgagtttatcgaacaggcggactatgtggtggtcaacgattacgaaagcaatcttcttcaaacgcgtactggctggaacgagcaggacattgtttcacgcgtgcaggcgtatatcaccacgcaaggttcggctggagccctggtacatacaccggagaagacctacgatattccgccggctcacacccgtcgtgtcgttgatccaactggttgcggcgacgcgtttcgcgccggcctgatctatggtattcagcataattatgattggttgaccattggccgcatgggaaacttaatgggtgcgctgaaagtggaacaccctggcagccaaaatcagcgtttcgattttgccgaattcaacgaccagttcaaacaatattttggctacgcgctc

SEQ ID NO: 724 - protein, 321 aa, synthetic construct
  REGION 1..321: note = Variant of adenosine kinase
MHHHHHHGGSGMSALICGSLAYDTIMVFPDQFKNHILPDRVHRLNVSFLVPRMRREFGGCAGNIAYNLHLLGGAPIVMATVGQDFGPYREHFETLGIDLSRVKIIDDLSTPQAFITTDHDHNQITAFHPGAMMRSYENHVRDVPGVTLGLVGPDGREGMIQNAEEFAAGGIPFIFDPGQAVPLFNGPELREFIEQADYVVVNDYESNLLQTRTGWNEQDIVSRVQAYITTQGSAGALVHTPEKTYDIPPAHTRRVVDPTGCGDAFRAGLIYGIQHNYDWLTIGRMGNLMGALKVEHPGSQNQRFDFAEFNDQFKQYFGYAL

SEQ ID NO: 725 - DNA, 963 bp, synthetic construct
  misc_feature 1..963: note = Variant of adenosine kinase
  source 1..963: mol_type = other DNA
atgcaccatcatcaccatcacgggggctccggcatgagtgcactgatttgcggttctttagcgtatgataccatcatggtgtttccggaccagttcaagaaccatattctgcccgatcgtgttcaccgcctcaatgtcagctttcttgtaccacgcatgcgtcgtgaatttggaggctgtgccggcaacattgcgtacaatctgcatctgttgggtggtgctccgatcgtaatggctacggtgggccaagatttcggtccgtatcgcgagcacttcgaaactctgggcattgacttatcccgcgtcaagatcatcgatgatctgagtacaccgcaggccttcattaccaccgaccatgatcataaccagattacggcgtttcatccaggcgcaatgatgcgttcgtacgaaaatcacgttcgtgatgtgccgggtgttaccttgggcctcgtaggtcctgatggacgcgagggcatgatccaaaatgccgaagaatttgctgctggtggcattccgttcatttttgacccaggtcaggcagtgccgctgttcaacggccccgaactgcgcgagtttatcgaacaggcggactatgtggtggtcaacgattacgaaagcaatcttcttcaaacgcgtactggctggaacgagcaggacattgtttcacgcgtgcaggcgtatatcaccacgcaaggttcgaaaggagccctggtacatacaccggagaagacctacgatattccgccgattcacgaacgtcgtgtcgttgatccaactggttgcggcgacgcgtttcgcgccggcctgatctatggtattcagcataattatgattggttgaccattggccgcatgggaaacttaatgggtgcgctgaaagtggaacaccctggcagccaaaatcagcgtttcgattttgccgaattcaacgaccagttcaaacaatattttggctacgcgctc

SEQ ID NO: 726 - protein, 321 aa, synthetic construct
  REGION 1..321: note = Variant of adenosine kinase
MHHHHHHGGSGMSALICGSLAYDTIMVFPDQFKNHILPDRVHRLNVSFLVPRMRREFGGCAGNIAYNLHLLGGAPIVMATVGQDFGPYREHFETLGIDLSRVKIIDDLSTPQAFITTDHDHNQITAFHPGAMMRSYENHVRDVPGVTLGLVGPDGREGMIQNAEEFAAGGIPFIFDPGQAVPLFNGPELREFIEQADYVVVNDYESNLLQTRTGWNEQDIVSRVQAYITTQGSKGALVHTPEKTYDIPPIHERRVVDPTGCGDAFRAGLIYGIQHNYDWLTIGRMGNLMGALKVEHPGSQNQRFDFAEFNDQFKQYFGYAL

SEQ ID NO: 727 - DNA, 963 bp, synthetic construct
  misc_feature 1..963: note = Variant of adenosine kinase
  source 1..963: mol_type = other DNA
atgcaccatcatcaccatcacgggggctccggcatgagtgcactgatttgcggttctttagcgtatgataccatcatggtgtttccggaccagttcaagaaccatattctgcccgatcgtgttcaccgcctcaatgtcagctttcttgtaccacgcatgcgtcgtgaatttggaggctgtgccggcaacattgcgtacaatctgcatctgttgggtggtgctccgatcgtaatggctacggtgggccaagatttcggtccgtatcgcgagcacttcgaaactctgggcattgacttatcccgcgtcaagatcatcgatgatctgagtacaccgcaggccttcattaccaccgaccacgatcataaccagattacggcgtttcatccaggcgcaatgatgcgttcgtacgaaaatcacgttcgtgatgtgccgggtgttaccttgggcctcgtaggtcctgatggacgcgagggcatgatccaaaatgccgaagaatttgctgctggtggcattccgttcatttttgacccaggtcaggcactgccgctgttcaacggccccgaactgcgcgagtttatcgaacaggcggactatgtggtggtcaacgattacgaaagcaatcttcttcaaacgcgtactggctggaacgagcaggacattgtttcacgcgtgcaggcgtatatcaccacgcaaggttcgaaaggagccctggtacatacaccggagaagacctacgatattccgccggctcacacccgtcgtgtcgttgatccaactggttgcggcgacgcgtttcgcgccggcctgatctatggtattcagcataattatgattggttgaccattggccgcatgggaaacttaatgggtgcgctgaaagtggaacaccctggcagccaaaatcagcgtttcgattttgccgaattcaacgaccagttcaaacaatattttggctacgcgctc

SEQ ID NO: 728 - protein, 321 aa, synthetic construct
  REGION 1..321: note = Variant of adenosine kinase
MHHHHHHGGSGMSALICGSLAYDTIMVFPDQFKNHILPDRVHRLNVSFLVPRMRREFGGCAGNIAYNLHLLGGAPIVMATVGQDFGPYREHFETLGIDLSRVKIIDDLSTPQAFITTDHDHNQITAFHPGAMMRSYENHVRDVPGVTLGLVGPDGREGMIQNAEEFAAGGIPFIFDPGQALPLFNGPELREFIEQADYVVVNDYESNLLQTRTGWNEQDIVSRVQAYITTQGSKGALVHTPEKTYDIPPAHTRRVVDPTGCGDAFRAGLIYGIQHNYDWLTIGRMGNLMGALKVEHPGSQNQRFDFAEFNDQFKQYFGYAL

SEQ ID NO: 729 - DNA, 963 bp, synthetic construct
  misc_feature 1..963: note = Variant of adenosine kinase
  source 1..963: mol_type = other DNA
atgcaccatcatcaccatcacgggggctccggcatgagtgcactgatttgcggttctttagcgtatgataccatcatggtgtttccggaccagttcaagaaccatattctgcccgatcgtgttcaccgcctcaatgtcagctttcttgtaccacgcatgcgtcgtgaatttggaggctgtgccggcaacattgcgtacaatctgcatctgttgggtggtgctccgatcgtaatggctacggtgggccaagatttcggtccgtatcgcgagcacttcgaaactctgggcattgacttatcccgcgtcaagatcatcgatgatctgagtacaccgcaggccttcattaccaccgacatggatcataaccagattacggcgtttcatccaggcgcaatgatgcgttcgtacgaaaatcacgttcgtgatgtgccgggtgttaccttgggcctcgtaggtcctgatggacgcgagggcatgatccaaaatgccgaagaatttgctgctggtggcattccgttcatttttgacccaggtcaggcagtgccgctgttcaacggccccgaactgcgcgagtttatcgaacaggcggactatgtggtggtcaacgattacgaaagcaatcttcttcaaacgcgtactggctggaacgagcaggacattgtttcacgcgtgcaggcgtatatcaccacgcaaggttcgaaaggagccctggtacatacaccggagaagacctacgatattccgccggcacacgaacgtcgtgtcgttgatccaactggttgcggcgacgcgtttcgcgccggcctgatctatggtattcagcataattatgattggttgaccattggccgcatgggaaacttaatgggtgcgctgaaagtggaacaccctggcagccaaaatcagcgtttcgattttgccgaattcaacgaccagttcaaacaatattttggctacgcgctc

SEQ ID NO: 730 - protein, 321 aa, synthetic construct
  REGION 1..321: note = Variant of adenosine kinase
MHHHHHHGGSGMSALICGSLAYDTIMVFPDQFKNHILPDRVHRLNVSFLVPRMRREFGGCAGNIAYNLHLLGGAPIVMATVGQDFGPYREHFETLGIDLSRVKIIDDLSTPQAFITTDMDHNQITAFHPGAMMRSYENHVRDVPGVTLGLVGPDGREGMIQNAEEFAAGGIPFIFDPGQAVPLFNGPELREFIEQADYVVVNDYESNLLQTRTGWNEQDIVSRVQAYITTQGSKGALVHTPEKTYDIPPAHERRVVDPTGCGDAFRAGLIYGIQHNYDWLTIGRMGNLMGALKVEHPGSQNQRFDFAEFNDQFKQYFGYAL

SEQ ID NO: 731 - DNA, 963 bp, synthetic construct
  misc_feature 1..963: note = Variant of adenosine kinase
  source 1..963: mol_type = other DNA
atgcaccatcatcaccatcacgggggctccggcatgagtgcactgatttgcggttctttagcgtatgataccatcatggtgtttccggaccagttcaagaaccatattctgcccgatcgtgttcaccgcctcaatgtcagctttcttgtaccacgcatgcgtcgtgaatttggaggctgtgccggcaacattgcgtacaatctgcatctgttgggtggtgctccgatcgtaatggctacggtgggccaagatttcggtccgtatcgcgagcacttcgaaactctgggcattgacttatcccgcgtcaagatcatcgatgatctgagtacaccgcaggccttcattaccaccgaccgcgatcataaccagattacggcgtttcatggcggcgcaatgatgcgttcgtacgaaaatcacgttcgtgatgtgccgggtgttaccttgggcctcgtaggtcctgatggacgcgagggcatgatccaaaatgccgaagaatttgctgctggtggcattccgttcatttttgacccaggtcaggcactgccgctgttcaacggccccgaactgcgcgagtttatcgaacaggcggactatgtggtggtcaacgattacgaaagcaatcttcttcaaacgcgtactggctggaacgagcaggacattgtttcacgcgtgcaggcgtatatcaccacgcaaggttcgaaaggagccctggtacatacaccggagaagacctacgatattccgccggcacacgaacgtcgtgtcgttgatccaactggttgcggcgacgcgtttcgcgccggcctgatctatggtattcagcataattatgattggttgaccattggccgcatgggaaacttaatgggtgcgctgaaagtggaacaccctggcagccaaaatcagcgtttcgattttgccgaattcaacgaccagttcaaacaatattttggctacgcgctc

SEQ ID NO: 732 - protein, 321 aa, synthetic construct
  REGION 1..321: note = Variant of adenosine kinase
MHHHHHHGGSGMSALICGSLAYDTIMVFPDQFKNHILPDRVHRLNVSFLVPRMRREFGGCAGNIAYNLHLLGGAPIVMATVGQDFGPYREHFETLGIDLSRVKIIDDLSTPQAFITTDRDHNQITAFHGGAMMRSYENHVRDVPGVTLGLVGPDGREGMIQNAEEFAAGGIPFIFDPGQALPLFNGPELREFIEQADYVVVNDYESNLLQTRTGWNEQDIVSRVQAYITTQGSKGALVHTPEKTYDIPPAHERRVVDPTGCGDAFRAGLIYGIQHNYDWLTIGRMGNLMGALKVEHPGSQNQRFDFAEFNDQFKQYFGYAL

SEQ ID NO: 733 - DNA, 963 bp, synthetic construct
  misc_feature 1..963: note = Variant of adenosine kinase
  source 1..963: mol_type = other DNA
atgcaccatcatcaccatcacgggggctccggcatgagtgcactgatttgcggttctttagcgtatgataccatcatggtgtttccggaccagttcaagaaccatattctgcccgatcgtgttcaccgcctcaatgtcagctttcttgtaccacgcatgcgtcgtgaatttggaggctgtgccggcaacattgcgtacaatctgcatctgttgggtggtgctccgatcgtaatggctacggtgggccaagatttcggtccgtatcgcgagcacttcgaaactctgggcattgacttatcccgcgtcaagatcatcgatgatctgagtacaccgcaggccttcattaccaccgacatggatcataaccagattacggcgtttcatggcggcgcaatgatgcgttcgtacgaaaatcacgttcgtgatgtgccgggtgttaccttgggcctcgtaggtcctgatggacgcgagggcatgatccaaaatgccgaagaatttgctgctggtggcattccgttcatttttgacccaggtcaggcactgccgctgttcaacggccccgaactgcgcgagtttatcgaacaggcggactatgtggtggtcaacgattacgaaagcaatcttcttcaaacgcgtactggctggaacgagcaggacattgtttcacgcgtgcaggcgtatatcaccacgcaaggttcggctggagccctggtacatacaccggagaagacctacgatattccgccggctcacacccgtcgtgtcgttgatccaactggttgcggcgacgcgtttcgcgccggcctgatctatggtattcagcataattatgattggttgaccattggccgcatgggaaacttaatgggtgcgctgaaagtggaacaccctggcacccaaaatcagcgtttcgattttgccgaattcaacgaccagttcaaacaatattttggctacgcgctc

SEQ ID NO: 734 - protein, 321 aa, synthetic construct
  REGION 1..321: note = Variant of adenosine kinase
MHHHHHHGGSGMSALICGSLAYDTIMVFPDQFKNHILPDRVHRLNVSFLVPRMRREFGGCAGNIAYNLHLLGGAPIVMATVGQDFGPYREHFETLGIDLSRVKIIDDLSTPQAFITTDMDHNQITAFHGGAMMRSYENHVRDVPGVTLGLVGPDGREGMIQNAEEFAAGGIPFIFDPGQALPLFNGPELREFIEQADYVVVNDYESNLLQTRTGWNEQDIVSRVQAYITTQGSAGALVHTPEKTYDIPPAHTRRVVDPTGCGDAFRAGLIYGIQHNYDWLTIGRMGNLMGALKVEHPGTQNQRFDFAEFNDQFKQYFGYAL

SEQ ID NO: 735 - DNA, 963 bp, synthetic construct
  misc_feature 1..963: note = Variant of adenosine kinase
  source 1..963: mol_type = other DNA
atgcaccatcatcaccatcacgggggctccggcatgagtgcactgatttgcggttctttagcgtatgataccatcatggtgtttccggaccagttcaagaaccatattctgcccgatcgtgttcaccgcctcaatgtcagctttcttgtaccacgcatgcgtcgtgaatttggaggctgtgccggcaacattgcgtacaatctgcatctgttgggtggtgctccgatcgtaatggctacggtgggccaagatttcggtccgtatcgcgagcacttcgaaactctgggcattgacttatcccgcgtcaagatcatcgatgatctgagtacaccgcaggccttcattaccaccgacatggatcataaccagattacggcgtttcatggcggcgcaatgatgcgttcgtacgaaaatcacgttcgtgatgtgccgggtgttaccttgggcctcgtaggtcctgatggacgcgagggcatgatccaaaatgccgaagaatttgctgctggtggcattccgttcatttttgacccaggtcaggcactgccgctgttcaacggccccgaactgcgcgagtttatcgaacaggcggactatgtggtggtcaacgattacgaaagcaatcttcttcaaacgcgtactggctggaacgagcaggacattgtttcacgcgtgcaggcgtatatcaccacgcaaggttcggctggagccctggtacatacaccggagaagacctacgatattccgccgattcacgaacgtcgtgtcgttgatccaactggttgcggcgacgcgtttcgcgccggcctgatctatggtattcagcataattatgattggttgaccattggccgcatgggaaacttaatgggtgcgctgaaagtggaacaccctggcagccaaaatcagcgtttcgattttgccgaattcaacgaccagttcaaacaatattttggctacgcgctc

SEQ ID NO: 736 - protein, 321 aa, synthetic construct
  REGION 1..321: note = Variant of adenosine kinase
MHHHHHHGGSGMSALICGSLAYDTIMVFPDQFKNHILPDRVHRLNVSFLVPRMRREFGGCAGNIAYNLHLLGGAPIVMATVGQDFGPYREHFETLGIDLSRVKIIDDLSTPQAFITTDMDHNQITAFHGGAMMRSYENHVRDVPGVTLGLVGPDGREGMIQNAEEFAAGGIPFIFDPGQALPLFNGPELREFIEQADYVVVNDYESNLLQTRTGWNEQDIVSRVQAYITTQGSAGALVHTPEKTYDIPPIHERRVVDPTGCGDAFRAGLIYGIQHNYDWLTIGRMGNLMGALKVEHPGSQNQRFDFAEFNDQFKQYFGYAL

SEQ ID NO: 737 - DNA, 963 bp, synthetic construct
  misc_feature 1..963: note = Variant of adenosine kinase
  source 1..963: mol_type = other DNA
atgcaccatcatcaccatcacgggggctccggcatgagtgcactgatttgcggttctttagcgtatgataccatcatggtgtttccggaccagttcaagaaccatattctgcccgatcgtgttcaccgcctcaatgtcagctttcttgtaccacgcatgcgtcgtgaatttggaggctgtgccggcaacattgcgtacaatctgcatctgttgggtggtgctccgatcgtaatggctacggtgggccaagatttcggtccgtatcgcgagcacttcgaaactctgggcattgacttatcccgcgtcaagatcatcgatgatctgagtacaccgcaggccttcattaccaccgacatggatcataaccagattacggcgtttcatccaggcgcaatgatgcgttcgtacgaaaatcacgttcgtgatgtgccgggtgttaccttgggcctcgtaggtcctgatggacgcgagggcatgatccaaaatgccgaagaatttgctgctggtggcattccgttcatttttgacccaggtcaggcagtgccgctgttcaacggccccgaactgcgcgagtttatcgaacaggcggactatgtggtggtcaacgattacgaaagcaatcttcttcaaacgcgtactggctggaacgagcaggacattgtttcacgcgtgcaggcgtatatcaccacgcaaggttcggctggagccctggtacatacaccggagaagacctacgatattccgccggctcacacccgtcgtgtcgttgatccaactggttgcggcgacgcgtttcgcgccggcctgatctatggtattcagcataattatgattggttgaccattggccgcatgggaaacttaatgggtgcgctgaaagtggaacaccctggcacgcaaaatcagcgtttcgattttgccgaattcaacgaccagttcaaacaatattttggctacgcgctc

SEQ ID NO: 738 - protein, 321 aa, synthetic construct
  REGION 1..321: note = Variant of adenosine kinase
MHHHHHHGGSGMSALICGSLAYDTIMVFPDQFKNHILPDRVHRLNVSFLVPRMRREFGGCAGNIAYNLHLLGGAPIVMATVGQDFGPYREHFETLGIDLSRVKIIDDLSTPQAFITTDMDHNQITAFHPGAMMRSYENHVRDVPGVTLGLVGPDGREGMIQNAEEFAAGGIPFIFDPGQAVPLFNGPELREFIEQADYVVVNDYESNLLQTRTGWNEQDIVSRVQAYITTQGSAGALVHTPEKTYDIPPAHTRRVVDPTGCGDAFRAGLIYGIQHNYDWLTIGRMGNLMGALKVEHPGTQNQRFDFAEFNDQFKQYFGYAL

SEQ ID NO: 739 - DNA, 963 bp, synthetic construct
  misc_feature 1..963: note = Variant of adenosine kinase
  source 1..963: mol_type = other DNA
atgcaccatcatcaccatcacgggggctccggcatgagtgcactgatttgcggttctttagcgtatgataccatcatggtgtttccggaccagttcaagaaccatattctgcccgatcgtgttcaccgcctcaatgtcagctttcttgtaccacgcatgcgtcgtgaatttggaggctgtgccggcaacattgcgtacaatctgcatctgttgggtggtgctccgatcgtaatggctacggtgggccaagatttcggtccgtatcgcgagcacttcgaaactctgggcattgacttatcccgcgtcaagatcatcgatgatctgagtacaccgcaggccttcattaccaccgaccacgatcataaccagattacggcgtttcatggcggcgcaatgatgcgttcgtacgaaaatcacgttcgtgatgtgccgggtgttaccttgggcctcgtaggtcctgatggacgcgagggcatgatccaaaatgccgaagaatttgctgctggtggcattccgttcatttttgacccaggtcaggcactgccgctgttcaacggccccgaactgcgcgagtttatcgaacaggcggactatgtggtggtcaacgattacgaaagcaatcttcttcaaacgcgtactggctggaacgagcaggacattgtttcacgcgtgcaggcgtatatcaccacgcaaggttcggctggagccctggtacatacaccggagaagacctacgatattccgccggcacacgaacgtcgtaaggtggatccaactggttgcggcgacgcgtttcgcgccggcctgatctatggtattcagcataattatgattggttgaccattggccgcatgggaaacttaatgggtgcgctgaaagtggaacaccctggcagccaaaatcagcgtttcgattttgccgaattcaacgaccagttcaaacaatattttggctacgcgctc

SEQ ID NO: 740 - protein, 321 aa, synthetic construct
  REGION 1..321: note = Variant of adenosine kinase
MHHHHHHGGSGMSALICGSLAYDTIMVFPDQFKNHILPDRVHRLNVSFLVPRMRREFGGCAGNIAYNLHLLGGAPIVMATVGQDFGPYREHFETLGIDLSRVKIIDDLSTPQAFITTDHDHNQITAFHGGAMMRSYENHVRDVPGVTLGLVGPDGREGMIQNAEEFAAGGIPFIFDPGQALPLFNGPELREFIEQADYVVVNDYESNLLQTRTGWNEQDIVSRVQAYITTQGSAGALVHTPEKTYDIPPAHERRKVDPTGCGDAFRAGLIYGIQHNYDWLTIGRMGNLMGALKVEHPGSQNQRFDFAEFNDQFKQYFGYAL

SEQ ID NO: 741 - DNA, 963 bp, synthetic construct
  misc_feature 1..963: note = Variant of adenosine kinase
  source 1..963: mol_type = other DNA
atgcaccatcatcaccatcacgggggctccggcatgagtgcactgatttgcggttctttagcgtatgataccatcatggtgtttccggaccagttcaagaaccatattctgcccgatcgtgttcaccgcctcaatgtcagctttcttgtaccacgcatgcgtcgtgaatttggaggctgtgccggcaacattgcgtacaatctgcatctgttgggtggtgctccgatcgtaatggctacggtgggccaagatttcggtccgtatcgcgagcacttcgaaactctgggcattgacttatcccgcgtcaagatcatcgatgatctgagtacaccgcaggccttcattaccaccgaccacgatcataaccagattacggcgtttcatccaggcgcaatgatgcgttcgtacgaaaatcacgttcgtgatgtgccgggtgttaccttgggcctcgtaggtcctgatggacgcgagggcatgatccaaaatgccgaagaatttgctgctggtggcattccgttcatttttgacccaggtcaggcagtgccgctgttcaacggccccgaactgcgcgagtttatcgaacaggcggactatgtggtggtcaacgattacgaaagcaatcttcttcaaacgcgtactggctggaacgagcaggacattgtttcacgcgtgcaggcgtatatcaccacgcaaggttcgaaaggagccctggtacatacaccggagaagacctacgatattccgccggcacacgaacgtcgtgtcgttgatccaactggttgcggcgacgcgtttcgcgccggcctgatctatggtattcagcataattatgattggttgaccattggccgcatgggaaacttaatgggtgcgctgaaagtggaacaccctggcagccaaaatcagcgtttcgattttgccgaattcaacgaccagttcaaacaatattttggctacgcgctc

SEQ ID NO: 742 - protein, 321 aa, synthetic construct
  REGION 1..321: note = Variant of adenosine kinase
MHHHHHHGGSGMSALICGSLAYDTIMVFPDQFKNHILPDRVHRLNVSFLVPRMRREFGGCAGNIAYNLHLLGGAPIVMATVGQDFGPYREHFETLGIDLSRVKIIDDLSTPQAFITTDHDHNQITAFHPGAMMRSYENHVRDVPGVTLGLVGPDGREGMIQNAEEFAAGGIPFIFDPGQAVPLFNGPELREFIEQADYVVVNDYESNLLQTRTGWNEQDIVSRVQAYITTQGSKGALVHTPEKTYDIPPAHERRVVDPTGCGDAFRAGLIYGIQHNYDWLTIGRMGNLMGALKVEHPGSQNQRFDFAEFNDQFKQYFGYAL

SEQ ID NO: 743 - DNA, 963 bp, synthetic construct
  misc_feature 1..963: note = Variant of adenosine kinase
  source 1..963: mol_type = other DNA
atgcaccatcatcaccatcacgggggctccggcatgagtgcactgatttgcggttctttagcgtatgataccatcatggtgtttccggaccagttcaagaaccatattctgcccgatcgtgttcaccgcctcaatgtcagctttcttgtaccacgcatgcgtcgtgaatttggaggctgtgccggcaacattgcgtacaatctgcatctgttgggtggtgctccgatcgtaatggctacggtgggccaagatttcggtccgtatcgcgagcacttcgaaactctgggcattgacttatcccgcgtcaagatcatcgatgatctgagtacaccgcaggccttcattaccaccgaccatgatcataaccagattacggcgtttcatccaggcgcaatgatgcgttcgtacgaaaatcacgttcgtgatgtgccgggtgttaccttgggcctcgtaggtcctgatggacgcgagggcatgatccaaaatgccgaagaatttgctgctggtggcattccgttcatttttgacccaggtcaggcactgccgctgttcaacggccccgaactgcgcgagtttatcgaacaggcggactatgtggtggtcaacgattacgaaagcaatcttcttcaaacgcgtactggctggaacgagcaggacattgtttcacgcgtgcaggcgtatatcaccacgcaaggttcgaaaggagccctggtacatacaccggagaagacctacgatattccgccgattcacacccgtcgtgtcgttgatccaactggttgcggcgacgcgtttcgcgccggcctgatctatggtattcagcataattatgattggttgaccattggccgcatgggaaacttaatgggtgcgctgaaagtggaacaccctggcacgcaaaatcagcgtttcgattttgccgaattcaacgaccagttcaaacaatattttggctacgcgctc

SEQ ID NO: 744 - protein, 321 aa, synthetic construct
  REGION 1..321: note = Variant of adenosine kinase
MHHHHHHGGSGMSALICGSLAYDTIMVFPDQFKNHILPDRVHRLNVSFLVPRMRREFGGCAGNIAYNLHLLGGAPIVMATVGQDFGPYREHFETLGIDLSRVKIIDDLSTPQAFITTDHDHNQITAFHPGAMMRSYENHVRDVPGVTLGLVGPDGREGMIQNAEEFAAGGIPFIFDPGQALPLFNGPELREFIEQADYVVVNDYESNLLQTRTGWNEQDIVSRVQAYITTQGSKGALVHTPEKTYDIPPIHTRRVVDPTGCGDAFRAGLIYGIQHNYDWLTIGRMGNLMGALKVEHPGTQNQRFDFAEFNDQFKQYFGYAL

SEQ ID NO: 745 - DNA, 963 bp, synthetic construct
  misc_feature 1..963: note = Variant of adenosine kinase
  source 1..963: mol_type = other DNA
atgcaccatcatcaccatcacgggggctccggcatgagtgcactgatttgcggttctttagcgtatgataccatcatggtgtttccggaccagttcaagaaccatattctgcccgatcgtgttcaccgcctcaatgtcagctttcttgtaccacgcatgcgtcgtgaatttggaggctgtgccggcaacattgcgtacaatctgcatctgttgggtggtgctccgatcgtaatggctacggtgggccaagatttcggtccgtatcgcgagcacttcgaaactctgggcattgacttatcccgcgtcaagatcatcgatgatctgagtacaccgcaggccttcattaccaccgaccatgatcataaccagattacggcgtttcatccaggcgcaatgatgcgttcgtacgaaaatcacgttcgtgatgtgccgggtgttaccttgggcctcgtaggtcctgatggacgcgagggcatgatccaaaatgccgaagaatttgctgctggtggcattccgttcatttttgacccaggtcaggcactgccgctgttcaacggccccgaactgcgcgagtttatcgaacaggcggactatgtggtggtcaacgattacgaaagcaatcttcttcaaacgcgtactggctggaacgagcaggacattgtttcacgcgtgcaggcgtatatcaccacgcaaggttcgaaaggagccctggtacatacaccggagaagacctacgatattccgccgattcacgaacgtcgtaaggtggatccaactggttgcggcgacgcgtttcgcgccggcctgatctatggtattcagcataattatgattggttgaccattggccgcatgggaaacttaatgggtgcgctgaaagtggaacaccctggcagccaaaatcagcgtttcgattttgccgaattcaacgaccagttcaaacaatattttggctacgcgctc

SEQ ID NO: 746 - protein, 321 aa, synthetic construct
  REGION 1..321: note = Variant of adenosine kinase
MHHHHHHGGSGMSALICGSLAYDTIMVFPDQFKNHILPDRVHRLNVSFLVPRMRREFGGCAGNIAYNLHLLGGAPIVMATVGQDFGPYREHFETLGIDLSRVKIIDDLSTPQAFITTDHDHNQITAFHPGAMMRSYENHVRDVPGVTLGLVGPDGREGMIQNAEEFAAGGIPFIFDPGQALPLFNGPELREFIEQADYVVVNDYESNLLQTRTGWNEQDIVSRVQAYITTQGSKGALVHTPEKTYDIPPIHERRKVDPTGCGDAFRAGLIYGIQHNYDWLTIGRMGNLMGALKVEHPGSQNQRFDFAEFNDQFKQYFGYAL

SEQ ID NO: 747 - DNA, 963 bp, synthetic construct
  misc_feature 1..963: note = Variant of adenosine kinase
  source 1..963: mol_type = other DNA
atgcaccatcatcaccatcacgggggctccggcatgagtgcactgatttgcggttctttagcgtatgataccatcatggtgtttccggaccagttcaagaaccatattctgcccgatcgtgttcaccgcctcaatgtcagctttcttgtaccacgcatgcgtcgtgaatttggaggctgtgccggcaacattgcgtacaatctgcatctgttgggtggtgctccgatcgtaatggctacggtgggccaagatttcggtccgtatcgcgagcacttcgaaactctgggcattgacttatcccgcgtcaagatcatcgatgatctgagtacaccgcaggccttcattaccaccgaccgcgatcataaccagattacggcgtttcatccaggcgcaatgatgcgttcgtacgaaaatcacgttcgtgatgtgccgggtgttaccttgggcctcgtaggtcctgatggacgcgagggcatgatccaaaatgccgaagaatttgctgctggtggcattccgttcatttttgacccaggtcaggcagtgccgctgttcaacggccccgaactgcgcgagtttatcgaacaggcggactatgtggtggtcaacgattacgaaagcaatcttcttcaaacgcgtactggctggaacgagcaggacattgtttcacgcgtgcaggcgtatatcaccacgcaaggttcgaaaggagccctggtacatacaccggagaagacctacgatattccgccggctcacgaacgtcgtgtcgttgatccaactggttgcggcgacgcgtttcgcgccggcctgatctatggtattcagcataattatgattggttgaccattggccgcatgggaaacttaatgggtgcgctgaaagtggaacaccctggcagccaaaatcagcgtttcgattttgccgaattcaacgaccagttcaaacaatattttggctacgcgctc

SEQ ID NO: 748 - protein, 321 aa, synthetic construct
  REGION 1..321: note = Variant of adenosine kinase
MHHHHHHGGSGMSALICGSLAYDTIMVFPDQFKNHILPDRVHRLNVSFLVPRMRREFGGCAGNIAYNLHLLGGAPIVMATVGQDFGPYREHFETLGIDLSRVKIIDDLSTPQAFITTDRDHNQITAFHPGAMMRSYENHVRDVPGVTLGLVGPDGREGMIQNAEEFAAGGIPFIFDPGQAVPLFNGPELREFIEQADYVVVNDYESNLLQTRTGWNEQDIVSRVQAYITTQGSKGALVHTPEKTYDIPPAHERRVVDPTGCGDAFRAGLIYGIQHNYDWLTIGRMGNLMGALKVEHPGSQNQRFDFAEFNDQFKQYFGYAL

SEQ ID NO: 749 - DNA, 963 bp, synthetic construct
  misc_feature 1..963: note = Variant of adenosine kinase
  source 1..963: mol_type = other DNA
atgcaccatcatcaccatcacgggggctccggcatgagtgcactgatttgcggttctttagcgtatgataccatcatggtgtttccggaccagttcaagaaccatattctgcccgatcgtgttcaccgcctcaatgtcagctttcttgtaccacgcatgcgtcgtgaatttggaggctgtgccggcaacattgcgtacaatctgcatctgttgggtggtgctccgatcgtaatggctacggtgggccaagatttcggtccgtatcgcgagcacttcgaaactctgggcattgacttatcccgcgtcaagatcatcgatgatctgagtacaccgcaggccttcattaccaccgacatggatcataaccagattacggcgtttcatccaggcgcaatgatgcgttcgtacgaaaatcacgttcgtgatgtgccgggtgttaccttgggcctcgtaggtcctgatggacgcgagggcatgatccaaaatgccgaagaatttgctgctggtggcattccgttcatttttgacccaggtcaggcactgccgctgttcaacggccccgaactgcgcgagtttatcgaacaggcggactatgtggtggtcaacgattacgaaagcaatcttcttcaaacgcgtactggctggaacgagcaggacattgtttcacgcgtgcaggcgtatatcaccacgcaaggttcggctggagccctggtacatacaccggagaagacctacgatattccgccggctcacgaacgtcgtgtcgttgatccaactggttgcggcgacgcgtttcgcgccggcctgatctatggtattcagcataattatgattggttgaccattggccgcatgggaaacttaatgggtgcgctgaaagtggaacaccctggcagccaaaatcagcgtttcgattttgccgaattcaacgaccagttcaaacaatattttggctacgcgctc

SEQ ID NO: 750 - protein, 321 aa, synthetic construct
  REGION 1..321: note = Variant of adenosine kinase
MHHHHHHGGSGMSALICGSLAYDTIMVFPDQFKNHILPDRVHRLNVSFLVPRMRREFGGCAGNIAYNLHLLGGAPIVMATVGQDFGPYREHFETLGIDLSRVKIIDDLSTPQAFITTDMDHNQITAFHPGAMMRSYENHVRDVPGVTLGLVGPDGREGMIQNAEEFAAGGIPFIFDPGQALPLFNGPELREFIEQADYVVVNDYESNLLQTRTGWNEQDIVSRVQAYITTQGSAGALVHTPEKTYDIPPAHERRVVDPTGCGDAFRAGLIYGIQHNYDWLTIGRMGNLMGALKVEHPGSQNQRFDFAEFNDQFKQYFGYAL

SEQ ID NO: 751 - DNA, 963 bp, synthetic construct
  misc_feature 1..963: note = Variant of adenosine kinase
  source 1..963: mol_type = other DNA
atgcaccatcatcaccatcacgggggctccggcatgagtgcactgatttgcggttctttagcgtatgataccatcatggtgtttccggaccagttcaagaaccatattctgcccgatcgtgttcaccgcctcaatgtcagctttcttgtaccacgcatgcgtcgtgaatttggaggctgtgccggcaacattgcgtacaatctgcatctgttgggtggtgctccgatcgtaatggctacggtgggccaagatttcggtccgtatcgcgagcacttcgaaactctgggcattgacttatcccgcgtcaagatcatcgatgatctgagtacaccgcaggccttcattaccaccgaccgcgatcataaccagattacggcgtttcatccaggcgcaatgatgcgttcgtacgaaaatcacgttcgtgatgtgccgggtgttaccttgggcctcgtaggtcctgatggacgcgagggcatgatccaaaatgccgaagaatttgctgctggtggcattccgttcatttttgacccaggtcaggcactgccgctgttcaacggccccgaactgcgcgagtttatcgaacaggcggactatgtggtggtcaacgattacgaaagcaatcttcttcaaacgcgtactggctggaacgagcaggacattgtttcacgcgtgcaggcgtatatcaccacgcaaggttcgaaaggagccctggtacatacaccggagaagacctacgatattccgccggctcacgaacgtcgtgtcgttgatccaactggttgcggcgacgcgtttcgcgccggcctgatctatggtattcagcataattatgattggttgaccattggccgcatgggaaacttaatgggtgcgctgaaagtggaacaccctggcagccaaaatcagcgtttcgattttgccgaattcaacgaccagttcaaacaatattttggctacgcgctc

SEQ ID NO: 752 - protein, 321 aa, synthetic construct
  REGION 1..321: note = Variant of adenosine kinase
MHHHHHHGGSGMSALICGSLAYDTIMVFPDQFKNHILPDRVHRLNVSFLVPRMRREFGGCAGNIAYNLHLLGGAPIVMATVGQDFGPYREHFETLGIDLSRVKIIDDLSTPQAFITTDRDHNQITAFHPGAMMRSYENHVRDVPGVTLGLVGPDGREGMIQNAEEFAAGGIPFIFDPGQALPLFNGPELREFIEQADYVVVNDYESNLLQTRTGWNEQDIVSRVQAYITTQGSKGALVHTPEKTYDIPPAHERRVVDPTGCGDAFRAGLIYGIQHNYDWLTIGRMGNLMGALKVEHPGSQNQRFDFAEFNDQFKQYFGYAL

SEQ ID NO: 753 - DNA, 963 bp, synthetic construct
  misc_feature 1..963: note = Variant of adenosine kinase
  source 1..963: mol_type = other DNA
atgcaccatcatcaccatcacgggggctccggcatgagtgcactgatttgcggttctttagcgtatgataccatcatggtgtttccggaccagttcaagaaccatattctgcccgatcgtgttcaccgcctcaatgtcagctttcttgtaccacgcatgcgtcgtgaatttggaggctgtgccggcaacattgcgtacaatctgcatctgttgggtggtgctccgatcgtaatggctacggtgggccaagatttcggtccgtatcgcgagcacttcgaaactctgggcattgacttatcccgcgtcaagatcatcgatgatctgagtacaccgcaggccttcattaccaccgacatggatcataaccagattacggcgtttcatccaggcgcaatgatgcgttcgtacgaaaatcacgttcgtgatgtgccgggtgttaccttgggcctcgtaggtcctgatggacgcgagggcatgatccaaaatgccgaagaatttgctgctggtggcattccgttcatttttgacccaggtcaggcagtgccgctgttcaacggccccgaactgcgcgagtttatcgaacaggcggactatgtggtggtcaacgattacgaaagcaatcttcttcaaacgcgtactggctggaacgagcaggacattgtttcacgcgtgcaggcgtatatcaccacgcaaggttcgaaaggagccctggtacatacaccggagaagacctacgatattccgccgattcacgaacgtcgtgtcgttgatccaactggttgcggcgacgcgtttcgcgccggcctgatctatggtattcagcataattatgattggttgaccattggccgcatgggaaacttaatgggtgcgctgaaagtggaacaccctggcacccaaaatcagcgtttcgattttgccgaattcaacgaccagttcaaacaatattttggctacgcgctc

SEQ ID NO: 754 - protein, 321 aa, synthetic construct
  REGION 1..321: note = Variant of adenosine kinase
MHHHHHHGGSGMSALICGSLAYDTIMVFPDQFKNHILPDRVHRLNVSFLVPRMRREFGGCAGNIAYNLHLLGGAPIVMATVGQDFGPYREHFETLGIDLSRVKIIDDLSTPQAFITTDMDHNQITAFHPGAMMRSYENHVRDVPGVTLGLVGPDGREGMIQNAEEFAAGGIPFIFDPGQAVPLFNGPELREFIEQADYVVVNDYESNLLQTRTGWNEQDIVSRVQAYITTQGSKGALVHTPEKTYDIPPIHERRVVDPTGCGDAFRAGLIYGIQHNYDWLTIGRMGNLMGALKVEHPGTQNQRFDFAEFNDQFKQYFGYAL

SEQ ID NO: 755 - DNA, 963 bp, synthetic construct
  misc_feature 1..963: note = Variant of adenosine kinase
  source 1..963: mol_type = other DNA
atgcaccatcatcaccatcacgggggctccggcatgagtgcactgatttgcggttctttagcgtatgataccatcatggtgtttccggaccagttcaagaaccatattctgcccgatcgtgttcaccgcctcaatgtcagctttcttgtaccacgcatgcgtcgtgaatttggaggctgtgccggcaacattgcgtacaatctgcatctgttgggtggtgctccgatcgtaatggctacggtgggccaagatttcggtccgtatcgcgagcacttcgaaactctgggcattgacttatcccgcgtcaagatcatcgatgatctgagtacaccgcaggccttcattaccaccgaccatgatcataaccagattacggcgtttcatggcggcgcaatgatgcgttcgtacgaaaatcacgttcgtgatgtgccgggtgttaccttgggcctcgtaggtcctgatggacgcgagggcatgatccaaaatgccgaagaatttgctgctggtggcattccgttcatttttgacccaggtcaggcactgccgctgttcaacggccccgaactgcgcgagtttatcgaacaggcggactatgtggtggtcaacgattacgaaagcaatcttcttcaaacgcgtactggctggaacgagcaggacattgtttcacgcgtgcaggcgtatatcaccacgcaaggttcgaaaggagccctggtacatacaccggagaagacctacgatattccgccggcacacgaacgtcgtgtcgttgatccaactggttgcggcgacgcgtttcgcgccggcctgatctatggtattcagcataattatgattggttgaccattggccgcatgggaaacttaatgggtgcgctgaaagtggaacaccctggcacgcaaaatcagcgtttcgattttgccgaattcaacgaccagttcaaacaatattttggctacgcgctc

SEQ ID NO: 756 - protein, 321 aa, synthetic construct
  REGION 1..321: note = Variant of adenosine kinase
MHHHHHHGGSGMSALICGSLAYDTIMVFPDQFKNHILPDRVHRLNVSFLVPRMRREFGGCAGNIAYNLHLLGGAPIVMATVGQDFGPYREHFETLGIDLSRVKIIDDLSTPQAFITTDHDHNQITAFHGGAMMRSYENHVRDVPGVTLGLVGPDGREGMIQNAEEFAAGGIPFIFDPGQALPLFNGPELREFIEQADYVVVNDYESNLLQTRTGWNEQDIVSRVQAYITTQGSKGALVHTPEKTYDIPPAHERRVVDPTGCGDAFRAGLIYGIQHNYDWLTIGRMGNLMGALKVEHPGTQNQRFDFAEFNDQFKQYFGYAL

SEQ ID NO: 757 - DNA, 963 bp, synthetic construct
  misc_feature 1..963: note = Variant of adenosine kinase
  source 1..963: mol_type = other DNA
atgcaccatcatcaccatcacgggggctccggcatgagtgcactgatttgcggttctttagcgtatgataccatcatggtgtttccggaccagttcaagaaccatattctgcccgatcgtgttcaccgcctcaatgtcagctttcttgtaccacgcatgcgtcgtgggtttggaggctgtgccggcaacattgcgtacaatctgcatctgttgggtggtgctccgatcgtaatggctacggtgggccaagatttcggtccgtatcgcgagcacttcgaaactctgggcattgacttatcccgcgtcaagatcatcgatgatctgagtacaccgcaggccttcattaccaccgaccatgatcacaaccagattacggcgtttcatccaggcgcaatgatgcgttcgtacgaaaatcacgttcgtgatgtgccgggtgttaccttgggcctcgtaggtcctgatggacgcgagggcatgatccaaaatgccgaagaatttgctgctggtggcattccgttcatttttgacccaggtcaggcactgccgctgttcaacggccccgaactgcgcgagtttatcgaacaggcggactatgtggtggtcaacgattacgaaagcaatcttcttcaaacgcgtactggctggaacgagcaggacattgtttcacgcgtgcaggcgtatatcaccacgcaaggttcgaaaggagccgtggtacatacaccggagaagacctacgatattccgccggcacacgaacgtcgcgtcgttgatccaactggttgcggcgacgcgtttcgcgccggcctgatctatggtattcagcataattatgattggttgaccattggccgcatgggaaacttaatgggtgcgctgaaagtggaacaccctggcacgcaaaatcagcgtttcgattttgccgaattcaacgaccagttcaaacaatattttggctacgcgctc

SEQ ID NO: 758 - protein, 321 aa, synthetic construct
  REGION 1..321: note = Variant of adenosine kinase
MHHHHHHGGSGMSALICGSLAYDTIMVFPDQFKNHILPDRVHRLNVSFLVPRMRRGFGGCAGNIAYNLHLLGGAPIVMATVGQDFGPYREHFETLGIDLSRVKIIDDLSTPQAFITTDHDHNQITAFHPGAMMRSYENHVRDVPGVTLGLVGPDGREGMIQNAEEFAAGGIPFIFDPGQALPLFNGPELREFIEQADYVVVNDYESNLLQTRTGWNEQDIVSRVQAYITTQGSKGAVVHTPEKTYDIPPAHERRVVDPTGCGDAFRAGLIYGIQHNYDWLTIGRMGNLMGALKVEHPGTQNQRFDFAEFNDQFKQYFGYAL

SEQ ID NO: 759 - DNA, 963 bp, synthetic construct
  misc_feature 1..963: note = Variant of adenosine kinase
  source 1..963: mol_type = other DNA
atgcaccatcatcaccatcacgggggctccggcatgagtgcactgatttgcggttctttagcgtatgataccatcatggtgtttccggaccagttcaagaaccatattctgcccgatcgtgttcaccgcctcaatgtcagctttcttgtaccacgcatgcgtcgtgaatttggaggctgtgccggcaacattgcgtacaatctgcatctgttgggtggtgctccgatcgtaatggctacggtgggccaagatttcggtccgtatcgcgagcacttcgaaactctgggcattgacttatcccgcgtcaagatcatcgatgatctgagtacaccgcaggccttcattaccaccgaccacgatcataaccagattacggcgtttcatccaggcgcaatgatgcgttcgtacgaaaatcacgttcgtgatgtgccgggtgttaccttgggcctcgtaggtcctgatggacgcgagggcatgatccaaaatgccgaagaatttgctgctggtggcattccgttcatttttgacccaggtcaggcactgccgctgttcaacggccccgaactgcgcgagtttatcgaacaggcggactatgtggtggtcaacgattacgaaagcaatcttcttcaaacgcgtactggctggaacgagcaggacattgtttcacgcgtgcaggcgtatatcaccacgcaaggttcgaaaggagccctggtacatacaccggagaagacctacgatattccgccgattcacgaacgtcgtgtcgttgatccaactggttgcggcgacgcgtttcgcgccggcctgatctatggtattcagcataattatgattggttgaccattggccgcatgggaaacttaatgggtgcgctgaaagtggaacaccctggcagccaaaatcagcgtttcgattttgccgaattcaacgaccagttcaaacaatattttggctacgcgctc

SEQ ID NO: 760 - protein, 321 aa, synthetic construct
  REGION 1..321: note = Variant of adenosine kinase
MHHHHHHGGSGMSALICGSLAYDTIMVFPDQFKNHILPDRVHRLNVSFLVPRMRREFGGCAGNIAYNLHLLGGAPIVMATVGQDFGPYREHFETLGIDLSRVKIIDDLSTPQAFITTDHDHNQITAFHPGAMMRSYENHVRDVPGVTLGLVGPDGREGMIQNAEEFAAGGIPFIFDPGQALPLFNGPELREFIEQADYVVVNDYESNLLQTRTGWNEQDIVSRVQAYITTQGSKGALVHTPEKTYDIPPIHERRVVDPTGCGDAFRAGLIYGIQHNYDWLTIGRMGNLMGALKVEHPGSQNQRFDFAEFNDQFKQYFGYAL

SEQ ID NO: 761 - DNA, 963 bp, synthetic construct
  misc_feature 1..963: note = Variant of adenosine kinase
  source 1..963: mol_type = other DNA
atgcaccatcatcaccatcacgggggctccggcatgagtgcactgatttgcggttctttagcgtatgataccatcatggtgtttccggaccagttcaagaaccatattctgcccgatcgtgttcaccgcctcaatgtcagctttcttgtaccacgcatgcgtcgtgaatttggaggctgtgccggcaacattgcgtacaatctgcatctgttgggtggtgctccgatcgtaatggctacggtgggccaagatttcggtccgtatcgcgagcacttcgaaactctgggcattgacttatcccgcgtcaagatcatcgatgatctgagtacaccgcaggccttcattaccaccgacatggatcataaccagattacggcgtttcatccaggcgcaatgatgcgttcgtacgaaaatcacgttcgtgatgtgccgggtgttaccttgggcctcgtaggtcctgatggacgcgagggcatgatccaaaatgccgaagaatttgctgctggtggcattccgttcatttttgacccaggtcaggcactgccgctgttcaacggccccgaactgcgcgagtttatcgaacaggcggactatgtggtggtcaacgattacgaaagcaatcttcttcaaacgcgtactggctggaacgagcaggacattgtttcacgcgtgcaggcgtatatcaccacgcaaggttcggctggagccctggtacatacaccggagaagacctacgatattccgccggcacacgaacgtcgtaagatggatccaactggttgcggcgacgcgtttcgcgccggcctgatctatggtattcagcataattatgattggttgaccattggccgcatgggaaacttaatgggtgcgctgaaagtggaacaccctggcagccaaaatcagcgtttcgattttgccgaattcaacgaccagttcaaacaatattttggctacgcgctc

SEQ ID NO: 762 - protein, 321 aa, synthetic construct
  REGION 1..321: note = Variant of adenosine kinase
MHHHHHHGGSGMSALICGSLAYDTIMVFPDQFKNHILPDRVHRLNVSFLVPRMRREFGGCAGNIAYNLHLLGGAPIVMATVGQDFGPYREHFETLGIDLSRVKIIDDLSTPQAFITTDMDHNQITAFHPGAMMRSYENHVRDVPGVTLGLVGPDGREGMIQNAEEFAAGGIPFIFDPGQALPLFNGPELREFIEQADYVVVNDYESNLLQTRTGWNEQDIVSRVQAYITTQGSAGALVHTPEKTYDIPPAHERRKMDPTGCGDAFRAGLIYGIQHNYDWLTIGRMGNLMGALKVEHPGSQNQRFDFAEFNDQFKQYFGYAL

SEQ ID NO: 763 - DNA, 963 bp, synthetic construct
  misc_feature 1..963: note = Variant of adenosine kinase
  source 1..963: mol_type = other DNA
atgcaccatcatcaccatcacgggggctccggcatgagtgcactgatttgcggttctctggcgtatgataccatcatggtgtttccggaccagttcaagaaccatattctgcccgatcgtgttcaccgcctcaatgtcagctttcttgtaccacgcatgcgtcgtgggtttggaggctgtgccggcaacattgcgtacaatctgcatctgttgggtggtgctccgatcgtaatggctacggtgggccaagatttcggtccgtatcgcgagcacttcgaaactctgggcattgacttatcccgcgtcaagatcatcgatgatctgagtacaccgcaggccttcattaccaccgaccatgatcacaaccagattacggcgtttcatccaggcgcaatgatgcgttcgtacgaaaatcacgttcgtgatgtgccgggtgttaccttgggcctcgtaggtcctgatggacgcgagggcatgatccaaaatgccgaagaatttgctgctggtggcattccgttcatttttgacccaggtcaggcactgccgctgttcaacggccccgaactgcgcgagtttatcgaacaggcggactatgtggtggtcaacgattacgaaagcaatcttcttcaaacgcgtactggctggaacgagcaggacattgtttcacgcgtgcaggcgtatatcgttacgcaaggttcgaaaggagccctggtacatacaccggagaagacctacgatattccgccggcacacgaacgtctggtcgttgatccaactggttgcggcgacgcgtttcgcgccggcctgatctatggtattcagcataattatgattggttgaccattggccgcatgggaaacttaatgggtgcgctgaaagtggaacaccctggcacgcaaaatcagcgtttcgattttgccgaattcaacgaccagttcaaacaatatttcggctacgcgctc

SEQ ID NO: 764 - protein, 321 aa, synthetic construct
  REGION 1..321: note = Variant of adenosine kinase
MHHHHHHGGSGMSALICGSLAYDTIMVFPDQFKNHILPDRVHRLNVSFLVPRMRRGFGGCAGNIAYNLHLLGGAPIVMATVGQDFGPYREHFETLGIDLSRVKIIDDLSTPQAFITTDHDHNQITAFHPGAMMRSYENHVRDVPGVTLGLVGPDGREGMIQNAEEFAAGGIPFIFDPGQALPLFNGPELREFIEQADYVVVNDYESNLLQTRTGWNEQDIVSRVQAYIVTQGSKGALVHTPEKTYDIPPAHERLVVDPTGCGDAFRAGLIYGIQHNYDWLTIGRMGNLMGALKVEHPGTQNQRFDFAEFNDQFKQYFGYAL

SEQ ID NO: 765 - DNA, 963 bp, synthetic construct
  misc_feature 1..963: note = Variant of adenosine kinase
  source 1..963: mol_type = other DNA
atgcaccatcatcaccatcacgggggctccggcatgagtgcactgatttgcggttctttagcgtatgataccatcatggtgtttccggaccagttcaagaaccatattctgcccgatcgtgttcaccgcctcaatgtcagctttcttgtaccacgcatgcgtcgtgaatttggaggctgtgccggcaacattgcgtacaatctgcatctgttgggtggtgctccgatcgtaatggctacggtgggccaagatttcggtccgtatcgcgagcacttcgaaactctgggcattgacttatcccgcgtcaagatcatcgatgatctgagtacaccgcaggccttcattaccaccgaccgcgatcataaccagattacggcgtttcatggcggcgcaatgatgcgttcgtacgaaaatcacgttcgtgatgtgccgggtgttaccttgggcctcgtaggtcctgatggacgcgagggcatgatccaaaatgccgaagaatttgctgctggtggcattccgttcatttttgacccaggtcaggcagtgccgctgttcaacggccccgaactgcgcgagtttatcgaacaggcggactatgtggtggtcaacgattacgaaagcaatcttcttcaaacgcgtactggctggaacgagcaggacattgtttcacgcgtgcaggcgtatatcaccacgcaaggttcgaaaggagccctggtacatacaccggagaagacctacgatattccgccggcacacgaacgtcgtgtcgttgatccaactggttgcggcgacgcgtttcgcgccggcctgatctatggtattcagcataattatgattggttgaccattggccgcatgggaaacttaatgggtgcgctgaaagtggaacaccctggcacgcaaaatcagcgtttcgattttgccgaattcaacgaccagttcaaacaatattttggctacgcgctc

SEQ ID NO: 766 - protein, 321 aa, synthetic construct
  REGION 1..321: note = Variant of adenosine kinase
MHHHHHHGGSGMSALICGSLAYDTIMVFPDQFKNHILPDRVHRLNVSFLVPRMRREFGGCAGNIAYNLHLLGGAPIVMATVGQDFGPYREHFETLGIDLSRVKIIDDLSTPQAFITTDRDHNQITAFHGGAMMRSYENHVRDVPGVTLGLVGPDGREGMIQNAEEFAAGGIPFIFDPGQAVPLFNGPELREFIEQADYVVVNDYESNLLQTRTGWNEQDIVSRVQAYITTQGSKGALVHTPEKTYDIPPAHERRVVDPTGCGDAFRAGLIYGIQHNYDWLTIGRMGNLMGALKVEHPGTQNQRFDFAEFNDQFKQYFGYAL

SEQ ID NO: 767 - DNA, 963 bp, synthetic construct
  misc_feature 1..963: note = Variant of adenosine kinase
  source 1..963: mol_type = other DNA
atgcaccatcatcaccatcacgggggctccggcatgagtgcactgatttgcggttctctggcgtatgataccatcatggtgtttccggaccagttcaagaaccatattctgcccgatcgtgttcaccgcctcaatgtcagctttcttgtaccacgcatgcgtcgtgggtttggaggctgtgccggcaacattgcgtacaatctgcatctgttgggtggtgctccgatcgtaatggctacggtgggccaagatttcggtccgtatcgcgagcacttcgaaactctgggcattgacttatcccgcgtcaagatcatcgatgatctgagtacaccgcaggccttcattaccaccgaccatgatatgaaccagattacggcgtttcatccaggcgcaatgatgcgttcgtacgaaaatcacgttcgtgatgtgccgggtgttaccttgggcctcgtaggtcctgatggacgcgagggcatgatccaaaatgccgaagaatttgctgctggtggcattccgttcatttttgacccaggtcaggcactgccgctgttcaacggccccgaactgcgcgagtttatcgaacaggcggactatgtggtggtcaacgattacgaaagcaatcttcttcaaacgcgtactggctggaacgagcaggacattgtttcacgcgtgcaggcgtatatcacgacgcaaggttcgaaaggagccctggtacatacaccggagaagacctacgatattccgccggcacacgaacgtcgcgtcgttgatccaactggttgcggcgacgcgtttcgcgccggcctgatctatggtattcagcataattatgattggttgaccattggccgcatgggaaacttaatgggtgcgctgaaagtggcacaccctggcacgcaaaatcagcgtttcgattttgccgaattcaacgaccagttcaaacaatattacggctacgcgctc

SEQ ID NO: 768 - protein, 321 aa, synthetic construct
  REGION 1..321: note = Variant of adenosine kinase
MHHHHHHGGSGMSALICGSLAYDTIMVFPDQFKNHILPDRVHRLNVSFLVPRMRRGFGGCAGNIAYNLHLLGGAPIVMATVGQDFGPYREHFETLGIDLSRVKIIDDLSTPQAFITTDHDMNQITAFHPGAMMRSYENHVRDVPGVTLGLVGPDGREGMIQNAEEFAAGGIPFIFDPGQALPLFNGPELREFIEQADYVVVNDYESNLLQTRTGWNEQDIVSRVQAYITTQGSKGALVHTPEKTYDIPPAHERRVVDPTGCGDAFRAGLIYGIQHNYDWLTIGRMGNLMGALKVAHPGTQNQRFDFAEFNDQFKQYYGYAL

SEQ ID NO: 769 - DNA, 963 bp, synthetic construct
  misc_feature 1..963: note = Variant of adenosine kinase
  source 1..963: mol_type = other DNA
atgcaccatcatcaccatcacgggggctccggcatgagtgcactgatttgcggttctttagcgtatgataccatcatggtgtttccggaccagttcaagaaccatattctgcccgatcgtgttcaccgcctcaatgtcagctttcttgtaccacgcatgcgtcgtgaatttggaggctgtgccggcaacattgcgtacaatctgcatctgttgggtggtgctccgatcgtaatggctacggtgggccaagatttcggtccgtatcgcgagcacttcgaaactctgggcattgacttatcccgcgtcaagatcatcgatgatctgagtacaccgcaggccttcattaccaccgaccgcgatcataaccagattacggcgtttcatccaggcgcaatgatgcgttcgtacgaaaatcacgttcgtgatgtgccgggtgttaccttgggcctcgtaggtcctgatggacgcgagggcatgatccaaaatgccgaagaatttgctgctggtggcattccgttcatttttgacccaggtcaggcagtgccgctgttcaacggccccgaactgcgcgagtttatcgaacaggcggactatgtggtggtcaacgattacgaaagcaatcttcttcaaacgcgtactggctggaacgagcaggacattgtttcacgcgtgcaggcgtatatcaccacgcaaggttcgaaaggagccctggtacatacaccggagaagacctacgatattccgccgattcacgaacgtcgtgcgatggatccaactggttgcggcgacgcgtttcgcgccggcctgatctatggtattcagcataattatgattggttgaccattggccgcatgggaaacttaatgggtgcgctgaaagtggaacaccctggcacccaaaatcagcgtttcgattttgccgaattcaacgaccagttcaaacaatattttggctacgcgctc

SEQ ID NO: 770 - protein, 321 aa, synthetic construct
  REGION 1..321: note = Variant of adenosine kinase
MHHHHHHGGSGMSALICGSLAYDTIMVFPDQFKNHILPDRVHRLNVSFLVPRMRREFGGCAGNIAYNLHLLGGAPIVMATVGQDFGPYREHFETLGIDLSRVKIIDDLSTPQAFITTDRDHNQITAFHPGAMMRSYENHVRDVPGVTLGLVGPDGREGMIQNAEEFAAGGIPFIFDPGQAVPLFNGPELREFIEQADYVVVNDYESNLLQTRTGWNEQDIVSRVQAYITTQGSKGALVHTPEKTYDIPPIHERRAMDPTGCGDAFRAGLIYGIQHNYDWLTIGRMGNLMGALKVEHPGTQNQRFDFAEFNDQFKQYFGYAL

SEQ ID NO: 771 - DNA, 963 bp, synthetic construct
  misc_feature 1..963: note = Variant of adenosine kinase
  source 1..963: mol_type = other DNA
atgcaccatcatcaccatcacgggggctccggcatgagtgcactgatttgcggttctttagcgtatgataccatcatggtgtttccggaccagttcaagaaccatattctgcccgatcgtgttcaccgcctcaatgtcagctttcttgtaccacgcatgcgtcgtgagtttggaggctgtgccggcaacattgcgtacaatctgcatctgttgggtggtgctccgatcgtaatggctacggtgggccaagatttcggtccgtatcgcgagcacttcgaaactctgggcattgacttatcccgcgtcaagatcatcgatgatctgagtacaccgcaggccttcattaccaccgaccatgatcataaccagattacggcgtttcatccaggcgcaatgatgcgttcgtacgaaaatcacgttcgtgatgtgccgggtgttaccttgggcctcgtaggtcctgatggacgcgagggcatgatccaaaatgccgaagaatttgctgctggtggcattccgttcatttttgacccaggtcaggcactgccgctgttcaacggccccgaactgcgcgagtttatcgaacaggcggactatgtggtggtcaacgattacgaaagcaatcttcttcaaacgcgtactggctggaacgagcaggacattgtttcacgcgtgcaggcgtatatcgttacgcaaggttcgaaaggagccctggtacatacaccggagaagacctacgatattccgccggcacacgaacgtcgcgtcgttgatccaactggttgcggcgacgcgtttcgcgccggcctgatctatggtattcagcataattatgattggttgaccattggccgcatgggaaacttaatgggtgcgctgaaagtggaacaccctggcacgcaaaatcagcgtttcgattttgccgaattcaacgaccagttcaaacaatattttggctacgcgctc

SEQ ID NO: 772 - protein, 321 aa, synthetic construct
  REGION 1..321: note = Variant of adenosine kinase
MHHHHHHGGSGMSALICGSLAYDTIMVFPDQFKNHILPDRVHRLNVSFLVPRMRREFGGCAGNIAYNLHLLGGAPIVMATVGQDFGPYREHFETLGIDLSRVKIIDDLSTPQAFITTDHDHNQITAFHPGAMMRSYENHVRDVPGVTLGLVGPDGREGMIQNAEEFAAGGIPFIFDPGQALPLFNGPELREFIEQADYVVVNDYESNLLQTRTGWNEQDIVSRVQAYIVTQGSKGALVHTPEKTYDIPPAHERRVVDPTGCGDAFRAGLIYGIQHNYDWLTIGRMGNLMGALKVEHPGTQNQRFDFAEFNDQFKQYFGYAL

SEQ ID NO: 773 - DNA, 963 bp, synthetic construct
  misc_feature 1..963: note = Variant of adenosine kinase
  source 1..963: mol_type = other DNA
atgcaccatcatcaccatcacgggggctccggcatgagtgcactgatttgcggttctttagcgtatgataccatcatggtgtttccggaccagttcaagaaccatattctgcccgatcgtgttcaccgcctcaatgtcagctttcttgtaccacgcatgcgtcgtgaatttggaggctgtgccggcaacattgcgtacaatctgcatctgttgggtggtgctccgatcgtaatggctacggtgggccaagatttcggtccgtatcgcgagcacttcgaaactctgggcattgacttatcccgcgtcaagatcatcgatgatctgagtacaccgcaggccttcattaccaccgaccatgatcataaccagattacggcgtttcatccaggcgcaatgatgcgttcgtacgaaaatcacgttcgtgatgtgccgggtgttaccttgggcctcgtaggtcctgatggacgcgagggcatgatccaaaatgccgaagaatttgctgctggtggcattccgttcatttttgacccaggtcaggcactgccgctgttcaacggccccgaactgcgcgagtttatcgaacaggcggactatgtggtggtcaacgattacgaaagcaatcttcttcaaacgcgtactggctggaacgagcaggacattgtttcacgcgtgcaggcgtatatcaccacgcaaggttcgaaaggagccctggtacatacaccggagaagacctacgatattccgccgattcacgaacgtcgtgtcgttgatccaactggttgcggcgacgcgtttcgcgccggcctgatctatggtattcagcataattatgattggttgaccattggccgcatgggaaacttaatgggtgcgctgaaagtggaacaccctggcacgcaaaatcagcgtttcgattttgccgaattcaacgaccagttcaaacaatattttggctacgcgctc

SEQ ID NO: 774 - protein, 321 aa, synthetic construct
  REGION 1..321: note = Variant of adenosine kinase
MHHHHHHGGSGMSALICGSLAYDTIMVFPDQFKNHILPDRVHRLNVSFLVPRMRREFGGCAGNIAYNLHLLGGAPIVMATVGQDFGPYREHFETLGIDLSRVKIIDDLSTPQAFITTDHDHNQITAFHPGAMMRSYENHVRDVPGVTLGLVGPDGREGMIQNAEEFAAGGIPFIFDPGQALPLFNGPELREFIEQADYVVVNDYESNLLQTRTGWNEQDIVSRVQAYITTQGSKGALVHTPEKTYDIPPIHERRVVDPTGCGDAFRAGLIYGIQHNYDWLTIGRMGNLMGALKVEHPGTQNQRFDFAEFNDQFKQYFGYAL

SEQ ID NO: 775 - DNA, 963 bp, synthetic construct
  misc_feature 1..963: note = Variant of adenosine kinase
  source 1..963: mol_type = other DNA
atgcaccatcatcaccatcacgggggctccggcatgagtgcactgatttgcggttctttagcgtatgataccatcatggtgtttccggaccagttcaagaaccatattctgcccgatcgtgttcaccgcctcaatgtcagctttcttgtaccacgcatgcgtcgtgaatttggaggctgtgccggcaacattgcgtacaatctgcatctgttgggtggtgctccgatcgtaatggctacggtgggccaagatttcggtccgtatcgcgagcacttcgaaactctgggcattgacttatcccgcgtcaagatcatcgatgatctgagtacaccgcaggccttcattaccaccgacatggatcataaccagattacggcgtttcatccaggcgcaatgatgcgttcgtacgaaaatcacgttcgtgatgtgccgggtgttaccttgggcctcgtaggtcctgatggacgcgagggcatgatccaaaatgccgaagaatttgctgctggtggcattccgttcatttttgacccaggtcaggcactgccgctgttcaacggccccgaactgcgcgagtttatcgaacaggcggactatgtggtggtcaacgattacgaaagcaatcttcttcaaacgcgtactggctggaacgagcaggacattgtttcacgcgtgcaggcgtatatcaccacgcaaggttcgaaaggagccctggtacatacaccggagaagacctacgatattccgccggctcacgaacgtcgtgtcgttgatccaactggttgcggcgacgcgtttcgcgccggcctgatctatggtattcagcataattatgattggttgaccattggccgcatgggaaacttaatgggtgcgctgaaagtggaacaccctggcacccaaaatcagcgtttcgattttgccgaattcaacgaccagttcaaacaatattttggctacgcgctc

SEQ ID NO: 776 - protein, 321 aa, synthetic construct
  REGION 1..321: note = Variant of adenosine kinase
MHHHHHHGGSGMSALICGSLAYDTIMVFPDQFKNHILPDRVHRLNVSFLVPRMRREFGGCAGNIAYNLHLLGGAPIVMATVGQDFGPYREHFETLGIDLSRVKIIDDLSTPQAFITTDMDHNQITAFHPGAMMRSYENHVRDVPGVTLGLVGPDGREGMIQNAEEFAAGGIPFIFDPGQALPLFNGPELREFIEQADYVVVNDYESNLLQTRTGWNEQDIVSRVQAYITTQGSKGALVHTPEKTYDIPPAHERRVVDPTGCGDAFRAGLIYGIQHNYDWLTIGRMGNLMGALKVEHPGTQNQRFDFAEFNDQFKQYFGYAL

SEQ ID NO: 777 - DNA, 963 bp, synthetic construct
  misc_feature 1..963: note = Variant of adenosine kinase
  source 1..963: mol_type = other DNA
atgcaccatcatcaccatcacgggggctccggcatgagtgcactgatttgcggttctttagcgtatgataccatcatggtgtttccggaccagttcaagaaccatattctgcccgatcgtgttcaccgcctcaatgtcagctttcttgtaccacgcatgcgtcgtgaatttggaggctgtgccggcaacattgcgtacaatctgcatctgttgggtggtgctccgatcgtaatggctacggtgggccaagatttcggtccgtatcgcgagcacttcgaaactctgggcattgacttatcccgcgtcaagatcatcgatgatctgagtacaccgcaggccttcattaccaccgacatggatcataaccagattacggcgtttcatccaggcgcaatgatgcgttcgtacgaaaatcacgttcgtgatgtgccgggtgttaccttgggcctcgtaggtcctgatggacgcgagggcatgatccaaaatgccgaagaatttgctgctggtggcattccgttcatttttgacccaggtcaggcactgccgctgttcaacggccccgaactgcgcgagtttatcgaacaggcggactatgtggtggtcaacgattacgaaagcaatcttcttcaaacgcgtactggctggaacgagcaggacattgtttcacgcgtgcaggcgtatatcaccacgcaaggttcggctggagccctggtacatacaccggagaagacctacgatattccgccggcacacgaacgtcgtgtggtggatccaactggttgcggcgacgcgtttcgcgccggcctgatctatggtattcagcataattatgattggttgaccattggccgcatgggaaacttaatgggtgcgctgaaagtggaacaccctggcacgcaaaatcagcgtttcgattttgccgaattcaacgaccagttcaaacaatattttggctacgcgctc

SEQ ID NO: 778 - protein, 321 aa, synthetic construct
  REGION 1..321: note = Variant of adenosine kinase
MHHHHHHGGSGMSALICGSLAYDTIMVFPDQFKNHILPDRVHRLNVSFLVPRMRREFGGCAGNIAYNLHLLGGAPIVMATVGQDFGPYREHFETLGIDLSRVKIIDDLSTPQAFITTDMDHNQITAFHPGAMMRSYENHVRDVPGVTLGLVGPDGREGMIQNAEEFAAGGIPFIFDPGQALPLFNGPELREFIEQADYVVVNDYESNLLQTRTGWNEQDIVSRVQAYITTQGSAGALVHTPEKTYDIPPAHERRVVDPTGCGDAFRAGLIYGIQHNYDWLTIGRMGNLMGALKVEHPGTQNQRFDFAEFNDQFKQYFGYAL

SEQ ID NO: 779 - DNA, 963 bp, synthetic construct
  misc_feature 1..963: note = Variant of adenosine kinase
  source 1..963: mol_type = other DNA
atgcaccatcatcaccatcacgggggctccggcatgagtgcactgatttgcggttctttcgcgtatgataccatcatggtgtttccggaccagttcaagaaccatattctgcccgatcgtgttcaccgcctcaatgtcagctttcttgtaccacgcatgcgtcgtgagtttggaggctgtgccggcaacattgcgtacaatctgcatctgttgggtggtgctccgatcgtaatggctacggtgggccaagatttcggtccgtatcgcgagcacttcgaaactctgggcattgacttatcccgcgtcaagatcatcgatgatctgagtacaccgcaggccttcattaccaccgaccatgatcacaaccagattacggcgtttcatccaggcgcaatgatgcgttcgtacgaaaatcacgttcgtgatgtgccgggtgttaccttgggcctcgtaggtcctgatggacgcgagggcatgatccaaaatgccgaagaatttgctgctggtggcattccgttcatttttgacccaggtcaggcactgccgctgttcaacggccccgaactgcgcgagtttatcgaacaggcggactatgtggtggtcaacgattacgaaagcaatcttcttcaaacgcgtactggctggaacgagcaggacattgtttcacgcgtgcaggcgtatatcgttacgcaaggttcgaaaggagccgtggtacatacaccggagaagacctacgatattccgccggcacacgaacgtcgcgtcgttgatccaactggttgcggcgacgcgtttcgcgccggcctgatctatggtattcagcataattatgattggttgaccattggccgcatgggaaacttaatgggtgcgctgaaagtggaacaccctggcacgcaaaatcagcgtttcgattttgccgaattcaacgaccagttcaaacaatattacggctacgcgctc

SEQ ID NO: 780 - protein, 321 aa, synthetic construct
  REGION 1..321: note = Variant of adenosine kinase
MHHHHHHGGSGMSALICGSFAYDTIMVFPDQFKNHILPDRVHRLNVSFLVPRMRREFGGCAGNIAYNLHLLGGAPIVMATVGQDFGPYREHFETLGIDLSRVKIIDDLSTPQAFITTDHDHNQITAFHPGAMMRSYENHVRDVPGVTLGLVGPDGREGMIQNAEEFAAGGIPFIFDPGQALPLFNGPELREFIEQADYVVVNDYESNLLQTRTGWNEQDIVSRVQAYIVTQGSKGAVVHTPEKTYDIPPAHERRVVDPTGCGDAFRAGLIYGIQHNYDWLTIGRMGNLMGALKVEHPGTQNQRFDFAEFNDQFKQYYGYAL

SEQ ID NO: 781 - DNA, 963 bp, synthetic construct
  misc_feature 1..963: note = Variant of adenosine kinase
  source 1..963: mol_type = other DNA
atgcaccatcatcaccatcacgggggctccggcatgagtgcactgatttgcggttctttagcgtatgataccatcatggtgtttccggaccagttcaagaaccatattctgcccgatcgtgttcaccgcctcaatgtcagctttcttgtaccacgcatgcgtcgtgaatttggaggctgtgccggcaacattgcgtacaatctgcatctgttgggtggtgctccgatcgtaatggctacggtgggccaagatttcggtccgtatcgcgagcacttcgaaactctgggcattgacttatcccgcgtcaagatcatcgatgatctgagtacaccgcaggccttcattaccaccgaccatgatcataaccagattacggcgtttcatccaggcgcaatgatgcgttcgtacgaaaatcacgttcgtgatgtgccgggtgttaccttgggcctcgtaggtcctgatggacgcgagggcatgatccaaaatgccgaagaatttgctgctggtggcattccgttcatttttgacccaggtcaggcagtgccgctgttcaacggccccgaactgcgcgagtttatcgaacaggcggactatgtggtggtcaacgattacgaaagcaatcttcttcaaacgcgtactggctggaacgagcaggacattgtttcacgcgtgcaggcgtatatcaccacgcaaggttcgaaaggagccctggtacatacaccggagaagacctacgatattccgccgattcacgaacgtcgtgtcgttgatccaactggttgcggcgacgcgtttcgcgccggcctgatctatggtattcagcataattatgattggttgaccattggccgcatgggaaacttaatgggtgcgctgaaagtggaacaccctggcacgcaaaatcagcgtttcgattttgccgaattcaacgaccagttcaaacaatattttggctacgcgctc

SEQ ID NO: 782 - protein, 321 aa, synthetic construct
  REGION 1..321: note = Variant of adenosine kinase
MHHHHHHGGSGMSALICGSLAYDTIMVFPDQFKNHILPDRVHRLNVSFLVPRMRREFGGCAGNIAYNLHLLGGAPIVMATVGQDFGPYREHFETLGIDLSRVKIIDDLSTPQAFITTDHDHNQITAFHPGAMMRSYENHVRDVPGVTLGLVGPDGREGMIQNAEEFAAGGIPFIFDPGQAVPLFNGPELREFIEQADYVVVNDYESNLLQTRTGWNEQDIVSRVQAYITTQGSKGALVHTPEKTYDIPPIHERRVVDPTGCGDAFRAGLIYGIQHNYDWLTIGRMGNLMGALKVEHPGTQNQRFDFAEFNDQFKQYFGYAL

SEQ ID NO: 783 - DNA, 963 bp, synthetic construct
  misc_feature 1..963: note = Variant of adenosine kinase
  source 1..963: mol_type = other DNA
atgcaccatcatcaccatcacgggggctccggcatgagtgcactgatttgcggttctttagcgtatgataccatcatggtgtttccggaccagttcaagaaccatattctgcccgatcgtgttcaccgcctcaatgtcagctttcttgtaccacgcatgcgtcgtgaatttggaggctgtgccggcaacattgcgtacaatctgcatctgttgggtggtgctccgatcgtaatggctacggtgggccaagatttcggtccgtatcgcgagcacttcgaaactctgggcattgacttatcccgcgtcaagatcatcgatgatctgagtacaccgcaggccttcattaccaccgacatggatcataaccagattacggcgtttcatccaggcgcaatgatgcgttcgtacgaaaatcacgttcgtgatgtgccgggtgttaccttgggcctcgtaggtcctgatggacgcgagggcatgatccaaaatgccgaagaatttgctgctggtggcattccgttcatttttgacccaggtcaggcactgccgctgttcaacggccccgaactgcgcgagtttatcgaacaggcggactatgtggtggtcaacgattacgaaagcaatcttcttcaaacgcgtactggctggaacgagcaggacattgtttcacgcgtgcaggcgtatatcaccacgcaaggttcgaaaggagccctggtacatacaccggagaagacctacgatattccgccggcacacgaacgtcgtaaggtggatccaactggttgcggcgacgcgtttcgcgccggcctgatctatggtattcagcataattatgattggttgaccattggccgcatgggaaacttaatgggtgcgctgaaagtggaacaccctggcacgcaaaatcagcgtttcgattttgccgaattcaacgaccagttcaaacaatattttggctacgcgctc

SEQ ID NO: 784 - protein, 321 aa, synthetic construct
  REGION 1..321: note = Variant of adenosine kinase
MHHHHHHGGSGMSALICGSLAYDTIMVFPDQFKNHILPDRVHRLNVSFLVPRMRREFGGCAGNIAYNLHLLGGAPIVMATVGQDFGPYREHFETLGIDLSRVKIIDDLSTPQAFITTDMDHNQITAFHPGAMMRSYENHVRDVPGVTLGLVGPDGREGMIQNAEEFAAGGIPFIFDPGQALPLFNGPELREFIEQADYVVVNDYESNLLQTRTGWNEQDIVSRVQAYITTQGSKGALVHTPEKTYDIPPAHERRKVDPTGCGDAFRAGLIYGIQHNYDWLTIGRMGNLMGALKVEHPGTQNQRFDFAEFNDQFKQYFGYAL

SEQ ID NO: 785 - DNA, 963 bp, synthetic construct
  misc_feature 1..963: note = Variant of adenosine kinase
  source 1..963: mol_type = other DNA
atgcaccatcatcaccatcacgggggctccggcatgagtgcactgatttgcggttctctggcgtatgataccatcatggtgtttccggaccagttcaagaaccatattctgcccgatcgtgttcaccgcctcaatgtcagctttcttgtaccacgcatgcgtcgtgaatttggaggctgtgccggcaacattgcgtacaatctgcatctgttgggtggtgctccgatcgtaatggctacggtgggccaagatttcggtccgtatcgcgagcacttcgaaactctgggcattgacttatcccgcgtcaagatcatcgatgatctgagtacaccgcaggccttcattaccaccgaccatgatatgaaccagattacggcgtttcatccaggcgcaatgatgcgttcgtacgaaaatcacgttcgtgatgtgccgggtgttaccttgggcctcgtaggtcctgatggatatgagggcatgatccaaaatgccgaagaatttgctgctggtggcattccgttcatttttgacccaggtcaggcactgccgctgttcaacggccccgaactgcgcgagtttatcgaacaggcggactatgtggtggtcaacgattacgaaagcaatcttcttcaaacgcgtactggctggaacgagcaggacattgtttcacgcgtgcaggcgtatatcgttacgcaaggttcgaaaggagccctggtacatacaccggagaagacctacgatattccgccggcacacgaacgtcgcgtcgttgatccaactggttgcggcgacgcgtttcgcgccggcctgatctatggtattcagcataattatgattggttgaccattggccgcatgggaaacttaatgggtgcgctgaaagtggaacaccctggcacgcaaaatcagcgtttcgattttgccgaattcaacgaccagttcaaacaatattttggctacgcgctc

SEQ ID NO: 786 - protein, 321 aa, synthetic construct
  REGION 1..321: note = Variant of adenosine kinase
MHHHHHHGGSGMSALICGSLAYDTIMVFPDQFKNHILPDRVHRLNVSFLVPRMRREFGGCAGNIAYNLHLLGGAPIVMATVGQDFGPYREHFETLGIDLSRVKIIDDLSTPQAFITTDHDMNQITAFHPGAMMRSYENHVRDVPGVTLGLVGPDGYEGMIQNAEEFAAGGIPFIFDPGQALPLFNGPELREFIEQADYVVVNDYESNLLQTRTGWNEQDIVSRVQAYIVTQGSKGALVHTPEKTYDIPPAHERRVVDPTGCGDAFRAGLIYGIQHNYDWLTIGRMGNLMGALKVEHPGTQNQRFDFAEFNDQFKQYFGYAL

SEQ ID NO: 787 - DNA, 963 bp, synthetic construct
  misc_feature 1..963: note = Variant of adenosine kinase
  source 1..963: mol_type = other DNA
atgcaccatcatcaccatcacgggggctccggcatgagtgcactgatttgcggttctctggcgtatgataccatcatggtgtttccggaccagttcaagaaccatattctgcccgatcgtgttcaccgcctcaatgtcagctttcttgtaccacgcatgcgtcgtgggtttggaggctgtgccggcaacattgcgtacaatctgcatctgttgggtggtgctccgatcgtaatggctacggtgggccaagatttcggtccgtatcgcgagcacttcgaaactctgggcattgacttatcccgcgtcaagatcatcgatgatctgagtacaccgcaggccttcattaccaccgaccatgatatgaaccagattacggcgtttcatccaggcgcaatgatgcgttcgtacgaaaatcacgttcgtgatgtgccgggtgttaccttgggcctcgtaggtcctgatggacgcgagggcatgatccaaaatgccgaagaatttgctgctggtggcattccgttcatttttgacccaggtcaggcactgccgctgttcaacggccccgaactgcgcgagtttatcgaacaggcggactatgtggtggtcaacgattacgaaagcaatcttcttcaaacgcgtactggctggaacgagcaggacattgtttcacgcgtgcaggcgtatatcacgacgcaaggttcgaaaggagccgtggtacatacaccggagaagacctacgatattccgccggcacacgaacgtcgcgtcgttgatccaactggttgcggcgacgcgtttcgcgccggcctgatctatggtattcagcataattatgattggttgaccattggccgcatgggaaacttaatgggtgcgctgaaagtggaacaccctggcacgcaaaatcagcgtttcgattttgccgaattcaacgaccagttcaaacaatattttggctacgcgctc

SEQ ID NO: 788 - protein, 321 aa, synthetic construct
  REGION 1..321: note = Variant of adenosine kinase
MHHHHHHGGSGMSALICGSLAYDTIMVFPDQFKNHILPDRVHRLNVSFLVPRMRRGFGGCAGNIAYNLHLLGGAPIVMATVGQDFGPYREHFETLGIDLSRVKIIDDLSTPQAFITTDHDMNQITAFHPGAMMRSYENHVRDVPGVTLGLVGPDGREGMIQNAEEFAAGGIPFIFDPGQALPLFNGPELREFIEQADYVVVNDYESNLLQTRTGWNEQDIVSRVQAYITTQGSKGAVVHTPEKTYDIPPAHERRVVDPTGCGDAFRAGLIYGIQHNYDWLTIGRMGNLMGALKVEHPGTQNQRFDFAEFNDQFKQYFGYAL

SEQ ID NO: 789 - DNA, 963 bp, synthetic construct
  misc_feature 1..963: note = Variant of adenosine kinase
  source 1..963: mol_type = other DNA
atgcaccatcatcaccatcacgggggctccggcatgagtgcactgatttgcggttctttagcgtatgataccatcatggtgtttccggaccagttcaagaaccatattctgcccgatcgtgttcaccgcctcaatgtcagctttcttgtaccacgcatgcgtcgtgagtttggaggctgtgccggcaacattgcgtacaatctgcatctgttgggtggtgctccgatcgtaatggctacggtgggccaagatttcggtccgtatcgcgagcacttcgaaactctgggcattgacttatcccgcgtcaagatcatcgatgatctgagtacaccgcaggccttcattaccaccgaccatgatcataaccagattacggcgtttcatccaggcgcaatgatgcgttcgtacgaaaatcacgttcgtgatgtgccgggtgttaccttgggcctcgtaggtcctgatggacgcgagggcatgatccaaaatgccgaagaatttgctgctggtggcattccgttcatttttgacccaggtcaggcactgccgctgttcaacggccccgaactgcgcgagtttatcgaacaggcggactatgtggtggtcaacgattacgaaagcaatcttcttcaaacgcgtactggctggaacgagcaggacattgtttcacgcgtgcaggcgtatatcaccacgcaaggttcgaaaggagccgtggtacatacaccggagaagacctacgatattccgccggcacacgaacgtcgcgtcgttgatccaactggttgcggcgacgcgtttcgcgccggcctgatctatggtattcagcataattatgattggttgaccattggccgcatgggaaacttaatgggtgcgctgaaagtggaacaccctggcacgcaaaatcagcgtttcgattttgccgaattcaacgaccagttcaaacaatattacggctacgcgctc

SEQ ID NO: 790 - protein, 321 aa, synthetic construct
  REGION 1..321: note = Variant of adenosine kinase
MHHHHHHGGSGMSALICGSLAYDTIMVFPDQFKNHILPDRVHRLNVSFLVPRMRREFGGCAGNIAYNLHLLGGAPIVMATVGQDFGPYREHFETLGIDLSRVKIIDDLSTPQAFITTDHDHNQITAFHPGAMMRSYENHVRDVPGVTLGLVGPDGREGMIQNAEEFAAGGIPFIFDPGQALPLFNGPELREFIEQADYVVVNDYESNLLQTRTGWNEQDIVSRVQAYITTQGSKGAVVHTPEKTYDIPPAHERRVVDPTGCGDAFRAGLIYGIQHNYDWLTIGRMGNLMGALKVEHPGTQNQRFDFAEFNDQFKQYYGYAL

SEQ ID NO: 791 - DNA, 963 bp, synthetic construct
  misc_feature 1..963: note = Variant of adenosine kinase
  source 1..963: mol_type = other DNA
atgcaccatcatcaccatcacgggggctccggcatgagtgcactgatttgcggttctctggcgtatgataccatcatggtgtttccggaccagttcaagaaccatattctgcccgatcgtgttcaccgcctcaatgtcagctttcttgtaccacgcatgcgtcgtgggtttggaggctgtgccggcaacattgcgtacaatctgcatctgttgggtggtgctccgatcgtaatggctacggtgggccaagatttcggtccgtatcgcgagcacttcgaaactctgggcattgacttatcccgcgtcaagatcatcgatgatctgagtacaccgcaggccttcattaccaccgaccatgatcataaccagattacggcgtttcatccaggcgcaatgatgcgttcgtacgaaaatcacgttcgtgatgtgccgggtgttaccttgggcctcgtaggtcctgatggacgcgagggcatgatccaaaatgccgaagaatttgctgctggtggcattccgttcatttttgacccaggtcaggcactgccgctgttcaacggccccgaactgcgcgagtttatcgaacaggcggactatgtggtggtcaacgattacgaaagcaatcttcttcaaacgcgtactggctggaacgagcaggacattgtttcacgcgtgcaggcgtatatcaccacgcaaggttcgaaaggagccctggtacatacaccggagaagacctacgatattccgccggcacacgaacgtcgtgtcgttgatccaactggttgcggcgacgcgtttcgcgccggcctgatctatggtattcagcataattatgattggttgaccattggccgcatgggaaacttaatgggtgcgctgaaagtggcacaccctggcacgcaaaatcagcgtttcgattttgccgaattcaacgaccagttcaaacaatatttcggctacgcgctc

SEQ ID NO: 792 - protein, 321 aa, synthetic construct
  REGION 1..321: note = Variant of adenosine kinase
MHHHHHHGGSGMSALICGSLAYDTIMVFPDQFKNHILPDRVHRLNVSFLVPRMRRGFGGCAGNIAYNLHLLGGAPIVMATVGQDFGPYREHFETLGIDLSRVKIIDDLSTPQAFITTDHDHNQITAFHPGAMMRSYENHVRDVPGVTLGLVGPDGREGMIQNAEEFAAGGIPFIFDPGQALPLFNGPELREFIEQADYVVVNDYESNLLQTRTGWNEQDIVSRVQAYITTQGSKGALVHTPEKTYDIPPAHERRVVDPTGCGDAFRAGLIYGIQHNYDWLTIGRMGNLMGALKVAHPGTQNQRFDFAEFNDQFKQYFGYAL

SEQ ID NO: 793 - DNA, 963 bp, synthetic construct
  misc_feature 1..963: note = Variant of adenosine kinase
  source 1..963: mol_type = other DNA
atgcaccatcatcaccatcacgggggctccggcatgagtgcactgatttgcggttctctggcgtatgataccatcatggtgtttccggaccagttcaagaaccatattctgcccgatcgtgttcaccgcctcaatgtcagctttcttgtaccacgcatgcgtcgtgggtttggaggctgtgccggcaacattgcgtacaatctgcatctgttgggtggtgctccgatcgtaatggctacggtgggccaagatttcggtccgtatcgcgagcacttcgaaactctgggcattgacttatcccgcgtcaagatcatcgatgatctgagtacaccgcaggccttcattaccaccgaccatgatatgaaccagattacggcgtttcatccaggcgcaatgatgcgttcgtacgaaaatcacgttcgtgatgtgccgggtgttaccttgggcctcgtaggtcctgatggacgcgagggcatgatccaaaatgccgaagaatttgctgctggtggcattccgttcatttttgacccaggtcaggcactgccgctgttcaacggccccgaactgcgcgagtttatcgaacaggcggactatgtggtggtcaacgattacgaaagcaatcttcttcaaacgcgtactggctggaacgagcaggacattgtttcacgcgtgcaggcgtatatcgttacgcaaggttcgaaaggatccctggtacatacaccggagaagacctacgatattccgccggcacacgaacgtctggtcgttgatccaactggttgcggcgacgcgtttcgcgccggcctgatctatggtattcagcataattatgattggttgaccattggccgcatgggaaacttaatgggtgcgctgaaagtggcacaccctggcacgcaaaatcagcgtttcgattttgccgaattcaacgaccagttcaaacaatatttcggctacgcgctc

SEQ ID NO: 794 - protein, 321 aa, synthetic construct
  REGION 1..321: note = Variant of adenosine kinase
MHHHHHHGGSGMSALICGSLAYDTIMVFPDQFKNHILPDRVHRLNVSFLVPRMRRGFGGCAGNIAYNLHLLGGAPIVMATVGQDFGPYREHFETLGIDLSRVKIIDDLSTPQAFITTDHDMNQITAFHPGAMMRSYENHVRDVPGVTLGLVGPDGREGMIQNAEEFAAGGIPFIFDPGQALPLFNGPELREFIEQADYVVVNDYESNLLQTRTGWNEQDIVSRVQAYIVTQGSKGSLVHTPEKTYDIPPAHERLVVDPTGCGDAFRAGLIYGIQHNYDWLTIGRMGNLMGALKVAHPGTQNQRFDFAEFNDQFKQYFGYAL

SEQ ID NO: 795 - DNA, 963 bp, synthetic construct
  misc_feature 1..963: note = Variant of adenosine kinase
  source 1..963: mol_type = other DNA
atgcaccatcatcaccatcacgggggctccggcatgagtgcactgatttgcggttctttagcgtatgataccatcatggtgtttccggaccagttcaagaaccatattctgcccgatcgtgttcaccgcctcaatgtcagctttcttgtaccacgcatgcgtcgtgggtttggaggctgtgccggcaacattgcgtacaatctgcatctgttgggtggtgctccgatcgtaatggctacggtgggccaagatttcggtccgtatcgcgagcacttcgaaactctgggcattgacttatcccgcgtcaagatcatcgatgatctgagtacaccgcaggccttcattaccaccgaccatgatcataaccagattacggcgtttcatccaggcgcaatgatgcgttcgtacgaaaatcacgttcgtgatgtgccgggtgttaccttgggcctcgtaggtcctgatggacgcgagggcatgatccaaaatgccgaagaatttgctgctggtggcattccgttcatttttgacccaggtcaggcactgccgctgttcaacggccccgaactgcgcgagtttatcgaacaggcggactatgtggtggtcaacgattacgaaagcaatcttcttcaaacgcgtactggctggaacgagcaggacattgtttcacgcgtgcaggcgtatatcacgacgcaaggttcgaaaggagccctggtacatacaccggagaagacctacgatattccgccggcacacgaacgtctggtcgttgatccaactggttgcggcgacgcgtttcgcgccggcctgatctatggtattcagcataattatgattggttgaccattggccgcatgggaaacttaatgggtgcgctgaaagtggaacaccctggcacgcaaaatcagcgtttcgattttgccgaattcaacgaccagttcaaacaatattttggctacgcgctc

SEQ ID NO: 796 - protein, 321 aa, synthetic construct
  REGION 1..321: note = Variant of adenosine kinase
MHHHHHHGGSGMSALICGSLAYDTIMVFPDQFKNHILPDRVHRLNVSFLVPRMRRGFGGCAGNIAYNLHLLGGAPIVMATVGQDFGPYREHFETLGIDLSRVKIIDDLSTPQAFITTDHDHNQITAFHPGAMMRSYENHVRDVPGVTLGLVGPDGREGMIQNAEEFAAGGIPFIFDPGQALPLFNGPELREFIEQADYVVVNDYESNLLQTRTGWNEQDIVSRVQAYITTQGSKGALVHTPEKTYDIPPAHERLVVDPTGCGDAFRAGLIYGIQHNYDWLTIGRMGNLMGALKVEHPGTQNQRFDFAEFNDQFKQYFGYAL

SEQ ID NO: 797 - DNA, 963 bp, synthetic construct
  misc_feature 1..963: note = Variant of adenosine kinase
  source 1..963: mol_type = other DNA
atgcaccatcatcaccatcacgggggctccggcatgagtgcactgatttgcggttctttagcgtatgataccatcatggtgtttccggaccagttcaagaaccatattctgcccgatcgtgttcaccgcctcaatgtcagctttcttgtaccacgcatgcgtcgtgaatttggaggctgtgccggcaacattgcgtacaatctgcatctgttgggtggtgctccgatcgtaatggctacggtgggccaagatttcggtccgtatcgcgagcacttcgaaactctgggcattgacttatcccgcgtcaagatcatcgatgatctgagtacaccgcaggccttcattaccaccgaccgcgatcataaccagattacggcgtttcatccaggcgcaatgatgcgttcgtacgaaaatcacgttcgtgatgtgccgggtgttaccttgggcctcgtaggtcctgatggacgcgagggcatgatccaaaatgccgaagaatttgctgctggtggcattccgttcatttttgacccaggtcaggcactgccgctgttcaacggccccgaactgcgcgagtttatcgaacaggcggactatgtggtggtcaacgattacgaaagcaatcttcttcaaacgcgtactggctggaacgagcaggacattgtttcacgcgtgcaggcgtatatcaccacgcaaggttcgaaaggagccctggtacatacaccggagaagacctacgatattccgccgattcacgaacgtcgtgtcgttgatccaactggttgcggcgacgcgtttcgcgccggcctgatctatggtattcagcataattatgattggttgaccattggccgcatgggaaacttaatgggtgcgctgaaagtggaacaccctggcagccaaaatcagcgtttcgattttgccgaattcaacgaccagttcaaacaatattttggctacgcgctc

SEQ ID NO: 798 - protein, 321 aa, synthetic construct
  REGION 1..321: note = Variant of adenosine kinase
MHHHHHHGGSGMSALICGSLAYDTIMVFPDQFKNHILPDRVHRLNVSFLVPRMRREFGGCAGNIAYNLHLLGGAPIVMATVGQDFGPYREHFETLGIDLSRVKIIDDLSTPQAFITTDRDHNQITAFHPGAMMRSYENHVRDVPGVTLGLVGPDGREGMIQNAEEFAAGGIPFIFDPGQALPLFNGPELREFIEQADYVVVNDYESNLLQTRTGWNEQDIVSRVQAYITTQGSKGALVHTPEKTYDIPPIHERRVVDPTGCGDAFRAGLIYGIQHNYDWLTIGRMGNLMGALKVEHPGSQNQRFDFAEFNDQFKQYFGYAL

SEQ ID NO: 799 - DNA, 963 bp, synthetic construct
  misc_feature 1..963: note = Variant of adenosine kinase
  source 1..963: mol_type = other DNA
atgcaccatcatcaccatcacgggggctccggcatgagtgcactgatttgcggttctttagcgtatgataccatcatggtgtttccggaccagttcaagaaccatattctgcccgatcgtgttcaccgcctcaatgtcagctttcttgtaccacgcatgcgtcgtgagtttggaggctgtgccggcaacattgcgtacaatctgcatctgttgggtggtgctccgatcgtaatggctacggtgggccaagatttcggtccgtatcgcgagcacttcgaaactctgggcattgacttatcccgcgtcaagatcatcgatgatctgagtacaccgcaggccttcattaccaccgaccatgatcacaaccagattacggcgtttcatccaggcgcaatgatgcgttcgtacgaaaatcacgttcgtgatgtgccgggtgttaccttgggcctcgtaggtcctgatggacgcgagggcatgatccaaaatgccgaagaatttgctgctggtggcattccgttcatttttgacccaggtcaggcactgccgctgttcaacggccccgaactgcgcgagtttatcgaacaggcggactatgtggtggtcaacgattacgaaagcaatcttcttcaaacgcgtactggctggaacgagcaggacattgtttcacgcgtgcaggcgtatatcgttacgcaaggttcgaaaggagccgtggtacatacaccggagaagacctacgatattccgccggcacacgaacgtcgtgtcgttgatccaactggttgcggcgacgcgtttcgcgccggcctgatctatggtattcagcataattatgattggttgaccattggccgcatgggaaacttaatgggtgcgctgaaagtggcacaccctggcacgcaaaatcagcgtttcgattttgccgaattcaacgaccagttcaaacaatattttggctacgcgctc

SEQ ID NO: 800 - protein, 321 aa, synthetic construct
  REGION 1..321: note = Variant of adenosine kinase
MHHHHHHGGSGMSALICGSLAYDTIMVFPDQFKNHILPDRVHRLNVSFLVPRMRREFGGCAGNIAYNLHLLGGAPIVMATVGQDFGPYREHFETLGIDLSRVKIIDDLSTPQAFITTDHDHNQITAFHPGAMMRSYENHVRDVPGVTLGLVGPDGREGMIQNAEEFAAGGIPFIFDPGQALPLFNGPELREFIEQADYVVVNDYESNLLQTRTGWNEQDIVSRVQAYIVTQGSKGAVVHTPEKTYDIPPAHERRVVDPTGCGDAFRAGLIYGIQHNYDWLTIGRMGNLMGALKVAHPGTQNQRFDFAEFNDQFKQYFGYAL

SEQ ID NO: 801 - DNA, 963 bp, synthetic construct
  misc_feature 1..963: note = Variant of adenosine kinase
  source 1..963: mol_type = other DNA
atgcaccatcatcaccatcacgggggctccggcatgagtgcactgatttgcggttctttcgcgtatgataccatcatggtgtttccggaccagttcaagaaccatattctgcccgatcgtgttcaccgcctcaatgtcagctttcttgtaccacgcatgcgtcgtgaatttggaggctgtgccggcaacattgcgtacaatctgcatctgttgggtggtgctccgatcgtaatggctacggtgggccaagatttcggtccgtatcgcgagcacttcgaaactctgggcattgacttatcccgcgtcaagatcatcgatgatctgagtacaccgcaggccttcattaccaccgaccatgatcataaccagattacggcgtttcatccaggcgcaatgatgcgttcgtacgaaaatcacgttcgtgatgtgccgggtgttaccttgggcctcgtaggtcctgatggacgcgagggcatgatccaaaatgccgaagaatttgctgctggtggcattccgttcatttttgacccaggtcaggcactgccgctgttcaacggccccgaactgcgcgagtttatcgaacaggcggactatgtggtggtcaacgattacgaaagcaatcttcttcaaacgcgtactggctggaacgagcaggacattgtttcacgcgtgcaggcgtatatcgttacgcaaggttcgaaaggagccctggtacatacaccggagaagacctacgatattccgccggcacacgaacgtcgcgtcgttgatccaactggttgcggcgacgcgtttcgcgccggcctgatctatggtattcagcataattatgattggttgaccattggccgcatgggaaacttaatgggtgcgctgaaagtggaacaccctggcacgcaaaatcagcgtttcgattttgccgaattcaacgaccagttcaaacaatattacggctacgcgctc

SEQ ID NO: 802 - protein, 321 aa, synthetic construct
  REGION 1..321: note = Variant of adenosine kinase
MHHHHHHGGSGMSALICGSFAYDTIMVFPDQFKNHILPDRVHRLNVSFLVPRMRREFGGCAGNIAYNLHLLGGAPIVMATVGQDFGPYREHFETLGIDLSRVKIIDDLSTPQAFITTDHDHNQITAFHPGAMMRSYENHVRDVPGVTLGLVGPDGREGMIQNAEEFAAGGIPFIFDPGQALPLFNGPELREFIEQADYVVVNDYESNLLQTRTGWNEQDIVSRVQAYIVTQGSKGALVHTPEKTYDIPPAHERRVVDPTGCGDAFRAGLIYGIQHNYDWLTIGRMGNLMGALKVEHPGTQNQRFDFAEFNDQFKQYYGYAL

SEQ ID NO: 803 - DNA, 963 bp, synthetic construct
  misc_feature 1..963: note = Variant of adenosine kinase
  source 1..963: mol_type = other DNA
atgcaccatcatcaccatcacgggggctccggcatgagtgcactgatttgcggttctttagcgtatgataccatcatggtgtttccggaccagttcaagaaccatattctgcccgatcgtgttcaccgcctcaatgtcagctttcttgtaccacgcatgcgtcgtgaatttggaggctgtgccggcaacattgcgtacaatctgcatctgttgggtggtgctccgatcgtaatggctacggtgggccaagatttcggtccgtatcgcgagcacttcgaaactctgggcattgacttatcccgcgtcaagatcatcgatgatctgagtacaccgcaggccttcattaccaccgaccatgatcataaccagattacggcgtttcatccaggcgcaatgatgcgttcgtacgaaaatcacgttcgtgatgtgccgggtgttaccttgggcctcgtaggtcctgatggacgcgagggcatgatccaaaatgccgaagaatttgctgctggtggcattccgttcatttttgacccaggtcaggcactgccgctgttcaacggccccgaactgcgcgagtttatcgaacaggcggactatgtggtggtcaacgattacgaaagcaatcttcttcaaacgcgtactggctggaacgagcaggacattgtttcacgcgtgcaggcgtatatcaccacgcaaggttcggctggagccctggtacatacaccggagaagacctacgatattccgccggcacacgaacgtcgtgtggtggatccaactggttgcggcgacgcgtttcgcgccggcctgatctatggtattcagcataattatgattggttgaccattggccgcatgggaaacttaatgggtgcgctgaaagtggaacaccctggcacgcaaaatcagcgtttcgattttgccgaattcaacgaccagttcaaacaatattttggctacgcgctc

SEQ ID NO: 804 - protein, 321 aa, synthetic construct
  REGION 1..321: note = Variant of adenosine kinase
MHHHHHHGGSGMSALICGSLAYDTIMVFPDQFKNHILPDRVHRLNVSFLVPRMRREFGGCAGNIAYNLHLLGGAPIVMATVGQDFGPYREHFETLGIDLSRVKIIDDLSTPQAFITTDHDHNQITAFHPGAMMRSYENHVRDVPGVTLGLVGPDGREGMIQNAEEFAAGGIPFIFDPGQALPLFNGPELREFIEQADYVVVNDYESNLLQTRTGWNEQDIVSRVQAYITTQGSAGALVHTPEKTYDIPPAHERRVVDPTGCGDAFRAGLIYGIQHNYDWLTIGRMGNLMGALKVEHPGTQNQRFDFAEFNDQFKQYFGYAL

SEQ ID NO: 805 - DNA, 963 bp, synthetic construct
  misc_feature 1..963: note = Variant of adenosine kinase
  source 1..963: mol_type = other DNA
atgcaccatcatcaccatcacgggggctccggcatgagtgcactgatttgcggttctttagcgtatgataccatcatggtgtttccggaccagttcaagaaccatattctgcccgatcgtgttcaccgcctcaatgtcagctttcttgtaccacgcatgcgtcgtgaatttggaggctgtgccggcaacattgcgtacaatctgcatctgttgggtggtgctccgatcgtaatggctacggtgggccaagatttcggtccgtatcgcgagcacttcgaaactctgggcattgacttatcccgcgtcaagatcatcgatgatctgagtacaccgcaggccttcattaccaccgaccgcgatcataaccagattacggcgtttcatccaggcgcaatgatgcgttcgtacgaaaatcacgttcgtgatgtgccgggtgttaccttgggcctcgtaggtcctgatggacgcgagggcatgatccaaaatgccgaagaatttgctgctggtggcattccgttcatttttgacccaggtcaggcactgccgctgttcaacggccccgaactgcgcgagtttatcgaacaggcggactatgtggtggtcaacgattacgaaagcaatcttcttcaaacgcgtactggctggaacgagcaggacattgtttcacgcgtgcaggcgtatatcaccacgcaaggttcggctggagccctggtacatacaccggagaagacctacgatattccgccggcacacgaacgtcgtgtcgttgatccaactggttgcggcgacgcgtttcgcgccggcctgatctatggtattcagcataattatgattggttgaccattggccgcatgggaaacttaatgggtgcgctgaaagtggaacaccctggcacgcaaaatcagcgtttcgattttgccgaattcaacgaccagttcaaacaatattttggctacgcgctc

SEQ ID NO: 806 - protein, 321 aa, synthetic construct
  REGION 1..321: note = Variant of adenosine kinase
MHHHHHHGGSGMSALICGSLAYDTIMVFPDQFKNHILPDRVHRLNVSFLVPRMRREFGGCAGNIAYNLHLLGGAPIVMATVGQDFGPYREHFETLGIDLSRVKIIDDLSTPQAFITTDRDHNQITAFHPGAMMRSYENHVRDVPGVTLGLVGPDGREGMIQNAEEFAAGGIPFIFDPGQALPLFNGPELREFIEQADYVVVNDYESNLLQTRTGWNEQDIVSRVQAYITTQGSAGALVHTPEKTYDIPPAHERRVVDPTGCGDAFRAGLIYGIQHNYDWLTIGRMGNLMGALKVEHPGTQNQRFDFAEFNDQFKQYFGYAL

SEQ ID NO: 807 - DNA, 963 bp, synthetic construct
  misc_feature 1..963: note = Variant of adenosine kinase
  source 1..963: mol_type = other DNA
atgcaccatcatcaccatcacgggggctccggcatgagtgcactgatttgcggttctttagcgtatgataccatcatggtgtttccggaccagttcaagaaccatattctgcccgatcgtgttcaccgcctcaatgtcagctttcttgtaccacgcatgcgtcgtgaatttggaggctgtgccggcaacattgcgtacaatctgcatctgttgggtggtgctccgatcgtaatggctacggtgggccaagatttcggtccgtatcgcgagcacttcgaaactctgggcattgacttatcccgcgtcaagatcatcgatgatctgagtacaccgcaggccttcattaccaccgaccatgatcataaccagattacggcgtttcatccaggcgcaatgatgcgttcgtacgaaaatcacgttcgtgatgtgccgggtgttaccttgggcctcgtaggtcctgatggacgcgagggcatgatccaaaatgccgaagaatttgctgctggtggcattccgttcatttttgacccaggtcaggcactgccgctgttcaacggccccgaactgcgcgagtttatcgaacaggcggactatgtggtggtcaacgattacgaaagcaatcttcttcaaacgcgtactggctggaacgagcaggacattgtttcacgcgtgcaggcgtatatcaccacgcaaggttcgaaaggagccctggtacatacaccggagaagacctacgatattccgccggcacacgaacgtctggtcgttgatccaactggttgcggcgacgcgtttcgcgccggcctgatctatggtattcagcataattatgattggttgaccattggccgcatgggaaacttaatgggtgcgctgaaagtggaacaccctggcacgcaaaatcagcgtttcgattttgccgaattcaacgaccagttcaaacaatattttggctacgcgctc

SEQ ID NO: 808 - protein, 321 aa, synthetic construct
  REGION 1..321: note = Variant of adenosine kinase
MHHHHHHGGSGMSALICGSLAYDTIMVFPDQFKNHILPDRVHRLNVSFLVPRMRREFGGCAGNIAYNLHLLGGAPIVMATVGQDFGPYREHFETLGIDLSRVKIIDDLSTPQAFITTDHDHNQITAFHPGAMMRSYENHVRDVPGVTLGLVGPDGREGMIQNAEEFAAGGIPFIFDPGQALPLFNGPELREFIEQADYVVVNDYESNLLQTRTGWNEQDIVSRVQAYITTQGSKGALVHTPEKTYDIPPAHERLVVDPTGCGDAFRAGLIYGIQHNYDWLTIGRMGNLMGALKVEHPGTQNQRFDFAEFNDQFKQYFGYAL

SEQ ID NO: 809 - DNA, 963 bp, synthetic construct
  misc_feature 1..963: note = Variant of adenosine kinase
  source 1..963: mol_type = other DNA
atgcaccatcatcaccatcacgggggctccggcatgagtgcactgatttgcggttctctggcgtatgataccatcatggtgtttccggaccagttcaagaaccatattctgcccgatcgtgttcaccgcctcaatgtcagctttcttgtaccacgcatgcgtcgtgaatttggaggctgtgccggcaacattgcgtacaatctgcatctgttgggtggtgctccgatcgtaatggctacggtgggccaagatttcggtccgtatcgcgagcacttcgaaactctgggcattgacttatcccgcgtcaagatcatcgatgatctgagtacaccgcaggccttcattaccaccgaccatgatcacaaccagattacggcgtttcatccaggcgcaatgatgcgttcgtacgaaaatcacgttcgtgatgtgccgggtgttaccttgggcctcgtaggtcctgatggacgcgagggcatgatccaaaatgccgaagaatttgctgctggtggcattccgttcatttttgacccaggtcaggcactgccgctgttcaacggccccgaactgcgcgagtttatcgaacaggcggactatgtggtggtcaacgattacgaaagcaatcttcttcaaacgcgtactggctggaacgagcaggacattgtttcacgcgtgcaggcgtatatcgttacgcaaggttcgaaaggagccctggtacatacaccggagaagacctacgatattccgccggcacacgaacgtcgtgtcgttgatccaactggttgcggcgacgcgtttcgcgccggcctgatctatggtattcagcataattatgattggttgaccattggccgcatgggaaacttaatgggtgcgctgaaagtggcacaccctggcacgcaaaatcagcgtttcgattttgccgaattcaacgaccagttcaaacaatattttggctacgcgctc

SEQ ID NO: 810 - protein, 321 aa, synthetic construct
  REGION 1..321: note = Variant of adenosine kinase
MHHHHHHGGSGMSALICGSLAYDTIMVFPDQFKNHILPDRVHRLNVSFLVPRMRREFGGCAGNIAYNLHLLGGAPIVMATVGQDFGPYREHFETLGIDLSRVKIIDDLSTPQAFITTDHDHNQITAFHPGAMMRSYENHVRDVPGVTLGLVGPDGREGMIQNAEEFAAGGIPFIFDPGQALPLFNGPELREFIEQADYVVVNDYESNLLQTRTGWNEQDIVSRVQAYIVTQGSKGALVHTPEKTYDIPPAHERRVVDPTGCGDAFRAGLIYGIQHNYDWLTIGRMGNLMGALKVAHPGTQNQRFDFAEFNDQFKQYFGYAL

SEQ ID NO: 811 - DNA, 963 bp, synthetic construct
  misc_feature 1..963: note = Variant of adenosine kinase
  source 1..963: mol_type = other DNA
atgcaccatcatcaccatcacgggggctccggcatgagtgcactgatttgcggttctttagcgtatgataccatcatggtgtttccggaccagttcaagaaccatattctgcccgatcgtgttcaccgcctcaatgtcagctttcttgtaccacgcatgcgtcgtgagtttggaggctgtgccggcaacattgcgtacaatctgcatctgttgggtggtgctccgatcgtaatggctacggtgggccaagatttcggtccgtatcgcgagcacttcgaaactctgggcattgacttatcccgcgtcaagatcatcgatgatctgagtacaccgcaggccttcattaccaccgaccatgatcacaaccagattacggcgtttcatccaggcgcaatgatgcgttcgtacgaaaatcacgttcgtgatgtgccgggtgttaccttgggcctcgtaggtcctgatggatatgagggcatgatccaaaatgccgaagaatttgctgctggtggcattccgttcatttttgacccaggtcaggcactgccgctgttcaacggccccgaactgcgcgagtttatcgaacaggcggactatgtggtggtcaacgattacgaaagcaatcttcttcaaacgcgtactggctggaacgagcaggacattgtttcacgcgtgcaggcgtatatcgttacgcaaggttcgaaaggagccctggtacatacaccggagaagacctacgatattccgccggcacacgaacgtcgcgtcgttgatccaactggttgcggcgacgcgtttcgcgccggcctgatctatggtattcagcataattatgattggttgaccattggccgcatgggaaacttaatgggtgcgctgaaagtggaacaccctggcacgcaaaatcagcgtttcgattttgccgaattcaacgaccagttcaaacaatattttggctacgcgctc

SEQ ID NO: 812 - protein, 321 aa, synthetic construct
  REGION 1..321: note = Variant of adenosine kinase
MHHHHHHGGSGMSALICGSLAYDTIMVFPDQFKNHILPDRVHRLNVSFLVPRMRREFGGCAGNIAYNLHLLGGAPIVMATVGQDFGPYREHFETLGIDLSRVKIIDDLSTPQAFITTDHDHNQITAFHPGAMMRSYENHVRDVPGVTLGLVGPDGYEGMIQNAEEFAAGGIPFIFDPGQALPLFNGPELREFIEQADYVVVNDYESNLLQTRTGWNEQDIVSRVQAYIVTQGSKGALVHTPEKTYDIPPAHERRVVDPTGCGDAFRAGLIYGIQHNYDWLTIGRMGNLMGALKVEHPGTQNQRFDFAEFNDQFKQYFGYAL

SEQ ID NO: 813 - DNA, 963 bp, synthetic construct
  misc_feature 1..963: note = Variant of adenosine kinase
  source 1..963: mol_type = other DNA
atgcaccatcatcaccatcacgggggctccggcatgagtgcactgatttgcggttctctggcgtatgataccatcatggtgtttccggaccagttcaagaaccatattctgcccgatcgtgttcaccgcctcaatgtcagctttcttgtaccacgcatgcgtcgtttttttggaggctgtgccggcaacattgcgtacaatctgcatctgttgggtggtgctccgatcgtaatggctacggtgggccaagatttcggtccgtatcgcgagcacttcgaaactctgggcattgacttatcccgcgtcaagatcatcgatgatctgagtacaccgcaggccttcattaccaccgaccatgatatgaaccagattacggcgtttcatccaggcgcaatgatgcgttcgtacgaaaatcacgttcgtgatgtgccgggtgttaccttgggcctcgtaggtcctgatggacgcgagggcatgatccaaaatgccgaagaatttgctgctggtggcattccgttcatttttgacccaggtcaggcactgccgctgttcaacggccccgaactgcgcgagtttatcgaacaggcggactatgtggtggtcaacgattacgaaagcaatcttcttcaaacgcgtactggctggaacgagcaggacattgtttcacgcgtgcaggcgtatatcgttacgcaaggttcgaaaggagccgtggtacatacaccggagaagacctacgatattccgccggcacacgaacgtcgcgtcgttgatccaactggttgcggcgacgcgtttcgcgccggcctgatctatggtattcagcataattatgattggttgaccattggccgcatgggaaacttaatgggtgcgctgaaagtggcacaccctggcacgcaaaatcagcgtttcgattttgccgaattcaacgaccagttcaaacaatatttcggctacgcgctc

SEQ ID NO: 814 - protein, 321 aa, synthetic construct
  REGION 1..321: note = Variant of adenosine kinase
MHHHHHHGGSGMSALICGSLAYDTIMVFPDQFKNHILPDRVHRLNVSFLVPRMRRFFGGCAGNIAYNLHLLGGAPIVMATVGQDFGPYREHFETLGIDLSRVKIIDDLSTPQAFITTDHDMNQITAFHPGAMMRSYENHVRDVPGVTLGLVGPDGREGMIQNAEEFAAGGIPFIFDPGQALPLFNGPELREFIEQADYVVVNDYESNLLQTRTGWNEQDIVSRVQAYIVTQGSKGAVVHTPEKTYDIPPAHERRVVDPTGCGDAFRAGLIYGIQHNYDWLTIGRMGNLMGALKVAHPGTQNQRFDFAEFNDQFKQYFGYAL

SEQ ID NO: 815 - DNA, 963 bp, synthetic construct
  misc_feature 1..963: note = Variant of adenosine kinase
  source 1..963: mol_type = other DNA
atgcaccatcatcaccatcacgggggctccggcatgagtgcactgatttgcggttctctggcgtatgataccatcatggtgtttccggaccagttcaagaaccatattctgcccgatcgtgttcaccgcctcaatgtcagctttcttgtaccacgcatgcgtcgtttttttggaggctgtgccggcaacattgcgtacaatctgcatctgttgggtggtgctccgatcgtaatggctacggtgggccaagatttcggtccgtatcgcgagcacttcgaaactctgggcattgacttatcccgcgtcaagatcatcgatgatctgagtacaccgcaggccttcattaccaccgaccatgatcacaaccagattacggcgtttcatccaggcgcaatgatgcgttcgtacgaaaatcacgttcgtgatgtgccgggtgttaccttgggcctcgtaggtcctgatggacgcgagggcatgatccaaaatgccgaagaatttgctgctggtggcattccgttcatttttgacccaggtcaggcactgccgctgttcaacggccccgaactgcgcgagtttatcgaacaggcggactatgtggtggtcaacgattacgaaagcaatcttcttcaaacgcgtactggctggaacgagcaggacattgtttcacgcgtgcaggcgtatatcacgacgcaaggttcgaaaggagccgtggtacatacaccggagaagacctacgatattccgccggcacacgaacgtcgcgtcgttgatccaactggttgcggcgacgcgtttcgcgccggcctgatctatggtattcagcataattatgattggttgaccattggccgcatgggaaacttaatgggtgcgctgaaagtggaacaccctggcacgcaaaatcagcgtttcgattttgccgaattcaacgaccagttcaaacaatattttggctacgcgctc

SEQ ID NO: 816 - protein, 321 aa, synthetic construct
  REGION 1..321: note = Variant of adenosine kinase
MHHHHHHGGSGMSALICGSLAYDTIMVFPDQFKNHILPDRVHRLNVSFLVPRMRRFFGGCAGNIAYNLHLLGGAPIVMATVGQDFGPYREHFETLGIDLSRVKIIDDLSTPQAFITTDHDHNQITAFHPGAMMRSYENHVRDVPGVTLGLVGPDGREGMIQNAEEFAAGGIPFIFDPGQALPLFNGPELREFIEQADYVVVNDYESNLLQTRTGWNEQDIVSRVQAYITTQGSKGAVVHTPEKTYDIPPAHERRVVDPTGCGDAFRAGLIYGIQHNYDWLTIGRMGNLMGALKVEHPGTQNQRFDFAEFNDQFKQYFGYAL

SEQ ID NO: 817 - DNA, 963 bp, synthetic construct
  misc_feature 1..963: note = Variant of adenosine kinase
  source 1..963: mol_type = other DNA
atgcaccatcatcaccatcacgggggctccggcatgagtgcactgatttgcggttctttagcgtatgataccatcatggtgtttccggaccagttcaagaaccatattctgcccgatcgtgttcaccgcctcaatgtcagctttcttgtaccacgcatgcgtcgtgaatttggaggctgtgccggcaacattgcgtacaatctgcatctgttgggtggtgctccgatcgtaatggctacggtgggccaagatttcggtccgtatcgcgagcacttcgaaactctgggcattgacttatcccgcgtcaagatcatcgatgatctgagtacaccgcaggccttcattaccaccgaccatgatcataaccagattacggcgtttcatccaggcgcaatgatgcgttcgtacgaaaatcacgttcgtgatgtgccgggtgttaccttgggcctcgtaggtcctgatggacgcgagggcatgatccaaaatgccgaagaatttgctgctggtggcattccgttcatttttgacccaggtcaggcactgccgctgttcaacggccccgaactgcgcgagtttatcgaacaggcggactatgtggtggtcaacgattacgaaagcaatcttcttcaaacgcgtactggctggaacgagcaggacattgtttcacgcgtgcaggcgtatatcacgacgcaaggttcgaaaggagccgtggtacatacaccggagaagacctacgatattccgccggcacacgaacgtctggtcgttgatccaactggttgcggcgacgcgtttcgcgccggcctgatctatggtattcagcataattatgattggttgaccattggccgcatgggaaacttaatgggtgcgctgaaagtggaacaccctggcacgcaaaatcagcgtttcgattttgccgaattcaacgaccagttcaaacaatattttggctacgcgctc

SEQ ID NO: 818 - protein, 321 aa, synthetic construct
  REGION 1..321: note = Variant of adenosine kinase
MHHHHHHGGSGMSALICGSLAYDTIMVFPDQFKNHILPDRVHRLNVSFLVPRMRREFGGCAGNIAYNLHLLGGAPIVMATVGQDFGPYREHFETLGIDLSRVKIIDDLSTPQAFITTDHDHNQITAFHPGAMMRSYENHVRDVPGVTLGLVGPDGREGMIQNAEEFAAGGIPFIFDPGQALPLFNGPELREFIEQADYVVVNDYESNLLQTRTGWNEQDIVSRVQAYITTQGSKGAVVHTPEKTYDIPPAHERLVVDPTGCGDAFRAGLIYGIQHNYDWLTIGRMGNLMGALKVEHPGTQNQRFDFAEFNDQFKQYFGYAL

SEQ ID NO: 819 - DNA, 963 bp, synthetic construct
  misc_feature 1..963: note = Variant of adenosine kinase
  source 1..963: mol_type = other DNA
atgcaccatcatcaccatcacgggggctccggcatgagtgcactgatttgcggttctttagcgtatgataccatcatggtgtttccggaccagttcaagaaccatattctgcccgatcgtgttcaccgcctcaatgtcagctttcttgtaccacgcatgcgtcgtgaatttggaggctgtgccggcaacattgcgtacaatctgcatctgttgggtggtgctccgatcgtaatggctacggtgggccaagatttcggtccgtatcgcgagcacttcgaaactctgggcattgacttatcccgcgtcaagatcatcgatgatctgagtacaccgcaggccttcattaccaccgaccacgatcataaccagattacggcgtttcatccaggcgcaatgatgcgttcgtacgaaaatcacgttcgtgatgtgccgggtgttaccttgggcctcgtaggtcctgatggacgcgagggcatgatccaaaatgccgaagaatttgctgctggtggcattccgttcatttttgacccaggtcaggcactgccgctgttcaacggccccgaactgcgcgagtttatcgaacaggcggactatgtggtggtcaacgattacgaaagcaatcttcttcaaacgcgtactggctggaacgagcaggacattgtttcacgcgtgcaggcgtatatcaccacgcaaggttcgaaaggagccctggtacatacaccggagaagacctacgatattccgccggctcacgaacgtcgtgtcgttgatccaactggttgcggcgacgcgtttcgcgccggcctgatctatggtattcagcataattatgattggttgaccattggccgcatgggaaacttaatgggtgcgctgaaagtggaacaccctggcagccaaaatcagcgtttcgattttgccgaattcaacgaccagttcaaacaatattttggctacgcgctc

SEQ ID NO: 820 - protein, 321 aa, synthetic construct; identical to SEQ ID NO: 598
  REGION 1..321: note = Variant of adenosine kinase

SEQ ID NO: 821 - DNA, 963 bp, synthetic construct
  misc_feature 1..963: note = Variant of adenosine kinase
  source 1..963: mol_type = other DNA
atgcaccatcatcaccatcacgggggctccggcatgagtgcactgatttgcggttctttcgcgtatgataccatcatggtgtttccggaccagttcaagaaccatattctgcccgatcgtgttcaccgcctcaatgtcagctttcttgtaccacgcatgcgtcgtgggtttggaggctgtgccggcaacattgcgtacaatctgcatctgttgggtggtgctccgatcgtaatggctacggtgggccaagatttcggtccgtatcgcgagcacttcgaaactctgggcattgacttatcccgcgtcaagatcatcgatgatctgagtacaccgcaggccttcattaccaccgaccatgatcataaccagattacggcgtttcatccaggcgcaatgatgcgttcgtacgaaaatcacgttcgtgatgtgccgggtgttaccttgggcctcgtaggtcctgatggacgcgagggcatgatccaaaatgccgaagaatttgctgctggtggcattccgttcatttttgacccaggtcaggcactgccgctgttcaacggccccgaactgcgcgagtttatcgaacaggcggactatgtggtggtcaacgattacgaaagcaatcttcttcaaacgcgtactggctggaacgagcaggacattgtttcacgcgtgcaggcgtatatcaccacgcaaggttcgaaaggagccctggtacatacaccggagaagacctacgatattccgccggcacacgaacgtcgtgtcgttgatccaactggttgcggcgacgcgtttcgcgccggcctgatctatggtattcagcataattatgattggttgaccattggccgcatgggaaacttaatgggtgcgctgaaagtggaacaccctggcacgcaaaatcagcgtttcgattttgccgaattcaacgaccagttcaaacaatattttggctacgcgctc

SEQ ID NO: 822 - protein, 321 aa, synthetic construct
  REGION 1..321: note = Variant of adenosine kinase
MHHHHHHGGSGMSALICGSFAYDTIMVFPDQFKNHILPDRVHRLNVSFLVPRMRRGFGGCAGNIAYNLHLLGGAPIVMATVGQDFGPYREHFETLGIDLSRVKIIDDLSTPQAFITTDHDHNQITAFHPGAMMRSYENHVRDVPGVTLGLVGPDGREGMIQNAEEFAAGGIPFIFDPGQALPLFNGPELREFIEQADYVVVNDYESNLLQTRTGWNEQDIVSRVQAYITTQGSKGALVHTPEKTYDIPPAHERRVVDPTGCGDAFRAGLIYGIQHNYDWLTIGRMGNLMGALKVEHPGTQNQRFDFAEFNDQFKQYFGYAL

SEQ ID NO: 823 - DNA, 963 bp, synthetic construct
  misc_feature 1..963: note = Variant of adenosine kinase
  source 1..963: mol_type = other DNA
atgcaccatcatcaccatcacgggggctccggcatgagtgcactgatttgcggttctctggcgtatgataccatcatggtgtttccggaccagttcaagaaccatattctgcccgatcgtgttcaccgcctcaatgtcagctttcttgtaccacgcatgcgtcgtgggtttggaggctgtgccggcaacattgcgtacaatctgcatctgttgggtggtgctccgatcgtaatggctacggtgggccaagatttcggtccgtatcgcgagcacttcgaaactctgggcattgacttatcccgcgtcaagatcatcgatgatctgagtacaccgcaggccttcattaccaccgaccatgatcacaaccagattacggcgtttcatccaggcgcaatgatgcgttcgtacgaaaatcacgttcgtgatgtgccgggtgttaccttgggcctcgtaggtcctgatggatatgagggcatgatccaaaatgccgaagaatttgctgctggtggcattccgttcatttttgacccaggtcaggcactgccgctgttcaacggccccgaactgcgcgagtttatcgaacaggcggactatgtggtggtcaacgattacgaaagcaatcttcttcaaacgcgtactggctggaacgagcaggacattgtttcacgcgtgcaggcgtatatcacgacgcaaggttcgaaaggagccctggtacatacaccggagaagacctacgatattccgccggcacacgaacgtcgtgtcgttgatccaactggttgcggcgacgcgtttcgcgccggcctgatctatggtattcagcataattatgattggttgaccattggccgcatgggaaacttaatgggtgcgctgaaagtggaacaccctggcacgcaaaatcagcgtttcgattttgccgaattcaacgaccagttcaaacaatattttggctacgcgctc

SEQ ID NO: 824 - protein, 321 aa, synthetic construct
  REGION 1..321: note = Variant of adenosine kinase
MHHHHHHGGSGMSALICGSLAYDTIMVFPDQFKNHILPDRVHRLNVSFLVPRMRRGFGGCAGNIAYNLHLLGGAPIVMATVGQDFGPYREHFETLGIDLSRVKIIDDLSTPQAFITTDHDHNQITAFHPGAMMRSYENHVRDVPGVTLGLVGPDGYEGMIQNAEEFAAGGIPFIFDPGQALPLFNGPELREFIEQADYVVVNDYESNLLQTRTGWNEQDIVSRVQAYITTQGSKGALVHTPEKTYDIPPAHERRVVDPTGCGDAFRAGLIYGIQHNYDWLTIGRMGNLMGALKVEHPGTQNQRFDFAEFNDQFKQYFGYAL

SEQ ID NO: 825 - DNA, 963 bp, synthetic construct
  misc_feature 1..963: note = Variant of adenosine kinase
  source 1..963: mol_type = other DNA
atgcaccatcatcaccatcacgggggctccggcatgagtgcactgatttgcggttctctggcgtatgataccatcatggtgtttccggaccagttcaagaaccatattctgcccgatcgtgttcaccgcctcaatgtcagctttcttgtaccacgcatgcgtcgtgggtttggaggctgtgccggcaacattgcgtacaatctgcatctgttgggtggtgctccgatcgtaatggctacggtgggccaagatttcggtccgtatcgcgagcacttcgaaactctgggcattgacttatcccgcgtcaagatcatcgatgatctgagtacaccgcaggccttcattaccaccgaccatgatcacaaccagattacggcgtttcatccaggcgcaatgatgcgttcgtacgaaaatcacgttcgtgatgtgccgggtgttaccttgggcctcgtaggtcctgatggatatgagggcatgatccaaaatgccgaagaatttgctgctggtggcattccgttcatttttgacccaggtcaggcactgccgctgttcaacggccccgaactgcgcgagtttatcgaacaggcggactatgtggtggtcaacgattacgaaagcaatcttcttcaaacgcgtactggctggaacgagcaggacattgtttcacgcgtgcaggcgtatatcacgacgcaaggttcgaaaggagccctggtacatacaccggagaagacctacgatattccgccggcacacgaacgtctggtcgttgatccaactggttgcggcgacgcgtttcgcgccggcctgatctatggtattcagcataattatgattggttgaccattggccgcatgggaaacttaatgggtgcgctgaaagtggcacaccctggcacgcaaaatcagcgtttcgattttgccgaattcaacgaccagttcaaacaatattttggctacgcgctc

SEQ ID NO: 826 - protein, 321 aa, synthetic construct
  REGION 1..321: note = Variant of adenosine kinase
MHHHHHHGGSGMSALICGSLAYDTIMVFPDQFKNHILPDRVHRLNVSFLVPRMRRGFGGCAGNIAYNLHLLGGAPIVMATVGQDFGPYREHFETLGIDLSRVKIIDDLSTPQAFITTDHDHNQITAFHPGAMMRSYENHVRDVPGVTLGLVGPDGYEGMIQNAEEFAAGGIPFIFDPGQALPLFNGPELREFIEQADYVVVNDYESNLLQTRTGWNEQDIVSRVQAYITTQGSKGALVHTPEKTYDIPPAHERLVVDPTGCGDAFRAGLIYGIQHNYDWLTIGRMGNLMGALKVAHPGTQNQRFDFAEFNDQFKQYFGYAL

SEQ ID NO: 827 - DNA, 963 bp, synthetic construct
  misc_feature 1..963: note = Variant of adenosine kinase
  source 1..963: mol_type = other DNA
atgcaccatcatcaccatcacgggggctccggcatgagtgcactgatttgcggttctttcgcgtatgataccatcatggtgtttccggaccagttcaagaaccatattctgcccgatcgtgttcaccgcctcaatgtcagctttcttgtaccacgcatgcgtcgtgggtttggaggctgtgccggcaacattgcgtacaatctgcatctgttgggtggtgctccgatcgtaatggctacggtgggccaagatttcggtccgtatcgcgagcacttcgaaactctgggcattgacttatcccgcgtcaagatcatcgatgatctgagtacaccgcaggccttcattaccaccgaccatgatcacaaccagattacggcgtttcatccaggcgcaatgatgcgttcgtacgaaaatcacgttcgtgatgtgccgggtgttaccttgggcctcgtaggtcctgatggacgcgagggcatgatccaaaatgccgaagaatttgctgctggtggcattccgttcatttttgacccaggtcaggcactgccgctgttcaacggccccgaactgcgcgagtttatcgaacaggcggactatgtggtggtcaacgattacgaaagcaatcttcttcaaacgcgtactggctggaacgagcaggacattgtttcacgcgtgcaggcgtatatcgttacgcaaggttcgaaaggagccctggtacatacaccggagaagacctacgatattccgccggcacacgaacgtcgcgtcgttgatccaactggttgcggcgacgcgtttcgcgccggcctgatctatggtattcagcataattatgattggttgaccattggccgcatgggaaacttaatgggtgcgctgaaagtggaacaccctggcacgcaaaatcagcgtttcgattttgccgaattcaacgaccagttcaaacaatattttggctacgcgctc

SEQ ID NO: 828 - protein, 321 aa, synthetic construct
  REGION 1..321: note = Variant of adenosine kinase
MHHHHHHGGSGMSALICGSFAYDTIMVFPDQFKNHILPDRVHRLNVSFLVPRMRRGFGGCAGNIAYNLHLLGGAPIVMATVGQDFGPYREHFETLGIDLSRVKIIDDLSTPQAFITTDHDHNQITAFHPGAMMRSYENHVRDVPGVTLGLVGPDGREGMIQNAEEFAAGGIPFIFDPGQALPLFNGPELREFIEQADYVVVNDYESNLLQTRTGWNEQDIVSRVQAYIVTQGSKGALVHTPEKTYDIPPAHERRVVDPTGCGDAFRAGLIYGIQHNYDWLTIGRMGNLMGALKVEHPGTQNQRFDFAEFNDQFKQYFGYAL

SEQ ID NO: 829 - DNA, 963 bp, synthetic construct
  misc_feature 1..963: note = Variant of adenosine kinase
  source 1..963: mol_type = other DNA
atgcaccatcatcaccatcacgggggctccggcatgagtgcactgatttgcggttctttagcgtatgataccatcatggtgtttccggaccagttcaagaaccatattctgcccgatcgtgttcaccgcctcaatgtcagctttcttgtaccacgcatgcgtcgtgaatttggaggctgtgccggcaacattgcgtacaatctgcatctgttgggtggtgctccgatcgtaatggctacggtgggccaagatttcggtccgtatcgcgagcacttcgaaactctgggcattgacttatcccgcgtcaagatcatcgatgatctgagtacaccgcaggccttcattaccaccgacatggatcataaccagattacggcgtttcatggcggcgcaatgatgcgttcgtacgaaaatcacgttcgtgatgtgccgggtgttaccttgggcctcgtaggtcctgatggacgcgagggcatgatccaaaatgccgaagaatttgctgctggtggcattccgttcatttttgacccaggtcaggcagtgccgctgttcaacggccccgaactgcgcgagtttatcgaacaggcggactatgtggtggtcaacgattacgaaagcaatcttcttcaaacgcgtactggctggaacgagcaggacattgtttcacgcgtgcaggcgtatatcaccacgcaaggttcggctggagccctggtacatacaccggagaagacctacgatattccgccggctcacgaacgtcgtgtcgttgatccaactggttgcggcgacgcgtttcgcgccggcctgatctatggtattcagcataattatgattggttgaccattggccgcatgggaaacttaatgggtgcgctgaaagtggaacaccctggcacccaaaatcagcgtttcgattttgccgaattcaacgaccagttcaaacaatattttggctacgcgctc

SEQ ID NO: 830 - protein, 321 aa, synthetic construct
  REGION 1..321: note = Variant of adenosine kinase
MHHHHHHGGSGMSALICGSLAYDTIMVFPDQFKNHILPDRVHRLNVSFLVPRMRREFGGCAGNIAYNLHLLGGAPIVMATVGQDFGPYREHFETLGIDLSRVKIIDDLSTPQAFITTDMDHNQITAFHGGAMMRSYENHVRDVPGVTLGLVGPDGREGMIQNAEEFAAGGIPFIFDPGQAVPLFNGPELREFIEQADYVVVNDYESNLLQTRTGWNEQDIVSRVQAYITTQGSAGALVHTPEKTYDIPPAHERRVVDPTGCGDAFRAGLIYGIQHNYDWLTIGRMGNLMGALKVEHPGTQNQRFDFAEFNDQFKQYFGYAL

SEQ ID NO: 831 - DNA, 963 bp, synthetic construct
  misc_feature 1..963: note = Variant of adenosine kinase
  source 1..963: mol_type = other DNA
atgcaccatcatcaccatcacgggggctccggcatgagtgcactgatttgcggttctctggcgtatgataccatcatggtgtttccggaccagttcaagaaccatattctgcccgatcgtgttcaccgcctcaatgtcagctttcttgtaccacgcatgcgtcgtgaatttggaggctgtgccggcaacattgcgtacaatctgcatctgttgggtggtgctccgatcgtaatggctacggtgggccaagatttcggtccgtatcgcgagcacttcgaaactctgggcattgacttatcccgcgtcaagatcatcgatgatctgagtacaccgcaggccttcattaccaccgaccatgatcacaaccagattacggcgtttcatccaggcgcaatgatgcgttcgtacgaaaatcacgttcgtgatgtgccgggtgttaccttgggcctcgtaggtcctgatggacgcgagggcatgatccaaaatgccgaagaatttgctgctggtggcattccgttcatttttgacccaggtcaggcactgccgctgttcaacggccccgaactgcgcgagtttatcgaacaggcggactatgtggtggtcaacgattacgaaagcaatcttcttcaaacgcgtactggctggaacgagcaggacattgtttcacgcgtgcaggcgtatatcacgacgcaaggttcgaaaggagccgtggtacatacaccggagaagacctacgatattccgccggcacacgaacgtcgcgtcgttgatccaactggttgcggcgacgcgtttcgcgccggcctgatctatggtattcagcataattatgattggttgaccattggccgcatgggaaacttaatgggtgcgctgaaagtggaacaccctggcacgcaaaatcagcgtttcgattttgccgaattcaacgaccagttcaaacaatattttggctacgcgctc

SEQ ID NO: 832 - protein, 321 aa, synthetic construct
  REGION 1..321: note = Variant of adenosine kinase
MHHHHHHGGSGMSALICGSLAYDTIMVFPDQFKNHILPDRVHRLNVSFLVPRMRREFGGCAGNIAYNLHLLGGAPIVMATVGQDFGPYREHFETLGIDLSRVKIIDDLSTPQAFITTDHDHNQITAFHPGAMMRSYENHVRDVPGVTLGLVGPDGREGMIQNAEEFAAGGIPFIFDPGQALPLFNGPELREFIEQADYVVVNDYESNLLQTRTGWNEQDIVSRVQAYITTQGSKGAVVHTPEKTYDIPPAHERRVVDPTGCGDAFRAGLIYGIQHNYDWLTIGRMGNLMGALKVEHPGTQNQRFDFAEFNDQFKQYFGYAL

SEQ ID NO: 833 - DNA, 963 bp, synthetic construct
  misc_feature 1..963: note = Variant of adenosine kinase
  source 1..963: mol_type = other DNA
atgcaccatcatcaccatcacgggggctccggcatgagtgcactgatttgcggttctttcgcgtatgataccatcatggtgtttccggaccagttcaagaaccatattctgcccgatcgtgttcaccgcctcaatgtcagctttcttgtaccacgcatgcgtcgtgaatttggaggctgtgccggcaacattgcgtacaatctgcatctgttgggtggtgctccgatcgtaatggctacggtgggccaagatttcggtccgtatcgcgagcacttcgaaactctgggcattgacttatcccgcgtcaagatcatcgatgatctgagtacaccgcaggccttcattaccaccgaccatgatcataaccagattacggcgtttcatccaggcgcaatgatgcgttcgtacgaaaatcacgttcgtgatgtgccgggtgttaccttgggcctcgtaggtcctgatggacgcgagggcatgatccaaaatgccgaagaatttgctgctggtggcattccgttcatttttgacccaggtcaggcactgccgctgttcaacggccccgaactgcgcgagtttatcgaacaggcggactatgtggtggtcaacgattacgaaagcaatcttcttcaaacgcgtactggctggaacgagcaggacattgtttcacgcgtgcaggcgtatatcaccacgcaaggttcgaaaggagccctggtacatacaccggagaagacctacgatattccgccggcacacgaacgtcgcgtcgttgatccaactggttgcggcgacgcgtttcgcgccggcctgatctatggtattcagcataattatgattggttgaccattggccgcatgggaaacttaatgggtgcgctgaaagtggaacaccctggcacgcaaaatcagcgtttcgattttgccgaattcaacgaccagttcaaacaatattttggctacgcgctc

SEQ ID NO: 834 - protein, 321 aa, synthetic construct
  REGION 1..321: note = Variant of adenosine kinase
MHHHHHHGGSGMSALICGSFAYDTIMVFPDQFKNHILPDRVHRLNVSFLVPRMRREFGGCAGNIAYNLHLLGGAPIVMATVGQDFGPYREHFETLGIDLSRVKIIDDLSTPQAFITTDHDHNQITAFHPGAMMRSYENHVRDVPGVTLGLVGPDGREGMIQNAEEFAAGGIPFIFDPGQALPLFNGPELREFIEQADYVVVNDYESNLLQTRTGWNEQDIVSRVQAYITTQGSKGALVHTPEKTYDIPPAHERRVVDPTGCGDAFRAGLIYGIQHNYDWLTIGRMGNLMGALKVEHPGTQNQRFDFAEFNDQFKQYFGYAL

SEQ ID NO: 835 - DNA, 963 bp, synthetic construct
  misc_feature 1..963: note = Variant of adenosine kinase
  source 1..963: mol_type = other DNA
atgcaccatcatcaccatcacgggggctccggcatgagtgcactgatttgcggttctctggcgtatgataccatcatggtgtttccggaccagttcaagaaccatattctgcccgatcgtgttcaccgcctcaatgtcagctttcttgtaccacgcatgcgtcgtttttttggaggctgtgccggcaacattgcgtacaatctgcatctgttgggtggtgctccgatcgtaatggctacggtgggccaagatttcggtccgtatcgcgagcacttcgaaactctgggcattgacttatcccgcgtcaagatcatcgatgatctgagtacaccgcaggccttcattaccaccgaccatgatcacaaccagattacggcgtttcatccaggcgcaatgatgcgttcgtacgaaaatcacgttcgtgatgtgccgggtgttaccttgggcctcgtaggtcctgatggatatgagggcatgatccaaaatgccgaagaatttgctgctggtggcattccgttcatttttgacccaggtcaggcactgccgctgttcaacggccccgaactgcgcgagtttatcgaacaggcggactatgtggtggtcaacgattacgaaagcaatcttcttcaaacgcgtactggctggaacgagcaggacattgtttcacgcgtgcaggcgtatatcgttacgcaaggttcgaaaggagccgtggtacatacaccggagaagacctacgatattccgccggcacacgaacgtcgcgtcgttgatccaactggttgcggcgacgcgtttcgcgccggcctgatctatggtattcagcataattatgattggttgaccattggccgcatgggaaacttaatgggtgcgctgaaagtggaacaccctggcacgcaaaatcagcgtttcgattttgccgaattcaacgaccagttcaaacaatattttggctacgcgctc

SEQ ID NO: 836 - protein, 321 aa, synthetic construct
  REGION 1..321: note = Variant of adenosine kinase
MHHHHHHGGSGMSALICGSLAYDTIMVFPDQFKNHILPDRVHRLNVSFLVPRMRRFFGGCAGNIAYNLHLLGGAPIVMATVGQDFGPYREHFETLGIDLSRVKIIDDLSTPQAFITTDHDHNQITAFHPGAMMRSYENHVRDVPGVTLGLVGPDGYEGMIQNAEEFAAGGIPFIFDPGQALPLFNGPELREFIEQADYVVVNDYESNLLQTRTGWNEQDIVSRVQAYIVTQGSKGAVVHTPEKTYDIPPAHERRVVDPTGCGDAFRAGLIYGIQHNYDWLTIGRMGNLMGALKVEHPGTQNQRFDFAEFNDQFKQYFGYAL

SEQ ID NO: 837 - DNA, 963 bp, synthetic construct
  misc_feature 1..963: note = Variant of adenosine kinase
  source 1..963: mol_type = other DNA
atgcaccatcatcaccatcacgggggctccggcatgagtgcactgatttgcggttctttagcgtatgataccatcatggtgtttccggaccagttcaagaaccatattctgcccgatcgtgttcaccgcctcaatgtcagctttcttgtaccacgcatgcgtcgtttttttggaggctgtgccggcaacattgcgtacaatctgcatctgttgggtggtgctccgatcgtaatggctacggtgggccaagatttcggtccgtatcgcgagcacttcgaaactctgggcattgacttatcccgcgtcaagatcatcgatgatctgagtacaccgcaggccttcattaccaccgaccatgatcacaaccagattacggcgtttcatccaggcgcaatgatgcgttcgtacgaaaatcacgttcgtgatgtgccgggtgttaccttgggcctcgtaggtcctgatggacgcgagggcatgatccaaaatgccgaagaatttgctgctggtggcattccgttcatttttgacccaggtcaggcactgccgctgttcaacggccccgaactgcgcgagtttatcgaacaggcggactatgtggtggtcaacgattacgaaagcaatcttcttcaaacgcgtactggctggaacgagcaggacattgtttcacgcgtgcaggcgtatatcaccacgcaaggttcgaaaggagccctggtacatacaccggagaagacctacgatattccgccggcacacgaacgtctggtcgttgatccaactggttgcggcgacgcgtttcgcgccggcctgatctatggtattcagcataattatgattggttgaccattggccgcatgggaaacttaatgggtgcgctgaaagtggaacaccctggcacgcaaaatcagcgtttcgattttgccgaattcaacgaccagttcaaacaatattttggctacgcgctc

SEQ ID NO: 838 - protein, 321 aa, synthetic construct
  REGION 1..321: note = Variant of adenosine kinase
MHHHHHHGGSGMSALICGSLAYDTIMVFPDQFKNHILPDRVHRLNVSFLVPRMRRFFGGCAGNIAYNLHLLGGAPIVMATVGQDFGPYREHFETLGIDLSRVKIIDDLSTPQAFITTDHDHNQITAFHPGAMMRSYENHVRDVPGVTLGLVGPDGREGMIQNAEEFAAGGIPFIFDPGQALPLFNGPELREFIEQADYVVVNDYESNLLQTRTGWNEQDIVSRVQAYITTQGSKGALVHTPEKTYDIPPAHERLVVDPTGCGDAFRAGLIYGIQHNYDWLTIGRMGNLMGALKVEHPGTQNQRFDFAEFNDQFKQYFGYAL

SEQ ID NO: 839 - DNA, 963 bp, synthetic construct
  misc_feature 1..963: note = Variant of adenosine kinase
  source 1..963: mol_type = other DNA
atgcaccatcatcaccatcacgggggctccggcatgagtgcactgatttgcggttctttcgcgtatgataccatcatggtgtttccggaccagttcaagaaccatattctgcccgatcgtgttcaccgcctcaatgtcagctttcttgtaccacgcatgcgtcgtgggtttggaggctgtgccggcaacattgcgtacaatctgcatctgttgggtggtgctccgatcgtaatggctacggtgggccaagatttcggtccgtatcgcgagcacttcgaaactctgggcattgacttatcccgcatcaagatcatcgatgatctgagtacaccgcaggccttcattaccaccgaccatgatcacaaccagattacggcgtttcatccaggcgcaatgatgcgttcgtacgaaaatcacgttcgtgatgtgccgggtgttaccttgggcctcgtaggtcctgatggacgcgagggcatgatccaaaatgccgaagaatttgctgctggtggcattccgttcatttttgacccaggtcaggcactgccgctgttcaacggccccgaactgcgcgagtttatcgaacaggcggactatgtggtggtcaacgattacgaaagcaatcttcttcaaacgcgtactggctggaacgagcaggacattgtttcacgcgtgcaggcgtatatcgttacgcaaggttcgaaaggagccctggtacatacaccggagaagacctacgatattccgccggcacacgaacgtcgcgtcgttgatccaactggttgcggcgacgcgtttcgcgccggcctgatctatggtattcagcataattatgattggttgaccattggccgcatgggaaacttaatgggtgcgctgaaagtggaacaccctggcacgcaaaatcagcgtttcgattttgccgaattcaacgaccagttcaaacaatattttggctacgcgctc

SEQ ID NO: 840 - protein, 321 aa, synthetic construct
  REGION 1..321: note = Variant of adenosine kinase
MHHHHHHGGSGMSALICGSFAYDTIMVFPDQFKNHILPDRVHRLNVSFLVPRMRRGFGGCAGNIAYNLHLLGGAPIVMATVGQDFGPYREHFETLGIDLSRIKIIDDLSTPQAFITTDHDHNQITAFHPGAMMRSYENHVRDVPGVTLGLVGPDGREGMIQNAEEFAAGGIPFIFDPGQALPLFNGPELREFIEQADYVVVNDYESNLLQTRTGWNEQDIVSRVQAYIVTQGSKGALVHTPEKTYDIPPAHERRVVDPTGCGDAFRAGLIYGIQHNYDWLTIGRMGNLMGALKVEHPGTQNQRFDFAEFNDQFKQYFGYAL

SEQ ID NO: 841 - DNA, 963 bp, synthetic construct
  misc_feature 1..963: note = Variant of adenosine kinase
  source 1..963: mol_type = other DNA
atgcaccatcatcaccatcacgggggctccggcatgagtgcactgatttgcggttctttcgcgtatgataccatcatggtgtttccggaccagttcaagaaccatattctgcccgatcgtgttcaccgcctcaatgtcagctttcttgtaccacgcatgcgtcgtttttttggaggctgtgccggcaacattgcgtacaatctgcatctgttgggtggtgctccgatcgtaatggctacggtgggccaagatttcggtccgtatcgcgagcacttcgaaactctgggcattgacttatcccgcgtcaagatcatcgatgatctgagtacaccgcaggccttcattaccaccgaccatgatcacaaccagattacggcgtttcatccaggcgcaatgatgcgttcgtacgaaaatcacgttcgtgatgtgccgggtgttaccttgggcctcgtaggtcctgatggacgcgagggcatgatccaaaatgccgaagaatttgctgctggtggcattccgttcatttttgacccaggtcaggcactgccgctgttcaacggccccgaactgcgcgagtttatcgaacaggcggactatgtggtggtcaacgattacgaaagcaatcttcttcaaacgcgtactggctggaacgagcaggacattgtttcacgcgtgcaggcgtatatcaccacgcaaggttcgaaaggagccctggtacatacaccggagaagacctacgatattccgccggcacacgaacgtcgcgtcgttgatccaactggttgcggcgacgcgtttcgcgccggcctgatctatggtattcagcataattatgattggttgaccattggccgcatgggaaacttaatgggtgcgctgaaagtggaacaccctggcacgcaaaatcagcgtttcgattttgccgaattcaacgaccagttcaaacaatattttggctacgcgctc

SEQ ID NO: 842 - protein, 321 aa, synthetic construct
  REGION 1..321: note = Variant of adenosine kinase
MHHHHHHGGSGMSALICGSFAYDTIMVFPDQFKNHILPDRVHRLNVSFLVPRMRRFFGGCAGNIAYNLHLLGGAPIVMATVGQDFGPYREHFETLGIDLSRVKIIDDLSTPQAFITTDHDHNQITAFHPGAMMRSYENHVRDVPGVTLGLVGPDGREGMIQNAEEFAAGGIPFIFDPGQALPLFNGPELREFIEQADYVVVNDYESNLLQTRTGWNEQDIVSRVQAYITTQGSKGALVHTPEKTYDIPPAHERRVVDPTGCGDAFRAGLIYGIQHNYDWLTIGRMGNLMGALKVEHPGTQNQRFDFAEFNDQFKQYFGYAL

SEQ ID NO: 843 - DNA, 963 bp, synthetic construct
  misc_feature 1..963: note = Variant of adenosine kinase
  source 1..963: mol_type = other DNA
atgcaccatcatcaccatcacgggggctccggcatgagtgcactgatttgcggttctttagcgtatgataccatcatggtgtttccggaccagttcaagaaccatattctgcccgatcgtgttcaccgcctcaatgtcagctttcttgtaccacgcatgcgtcgtgaatttggaggctgtgccggcaacattgcgtacaatctgcatctgttgggtggtgctccgatcgtaatggctacggtgggccaagatttcggtccgtatcgcgagcacttcgaaactctgggcattgacttatcccgcgtcaagatcatcgatgatctgagtacaccgcaggccttcattaccaccgaccatgatcataaccagattacggcgtttcatccaggcgcaatgatgcgttcgtacgaaaatcacgttcgtgatgtgccgggtgttaccttgggcctcgtaggtcctgatggacgcgagggcatgatccaaaatgccgaagaatttgctgctggtggcattccgttcatttttgacccaggtcaggcactgccgctgttcaacggccccgaactgcgcgagtttatcgaacaggcggactatgtggtggtcaacgattacgaaagcaatcttcttcaaacgcgtactggctggaacgagcaggacattgtttcacgcgtgcaggcgtatatcaccacgcaaggttcgaaaggagccctggtacatacaccggagaagacctacgatattccgccggcacacgaacgtcgtgtgatggatccaactggttgcggcgacgcgtttcgcgccggcctgatctatggtattcagcataattatgattggttgaccattggccgcatgggaaacttaatgggtgcgctgaaagtggaacaccctggcacgcaaaatcagcgtttcgattttgccgaattcaacgaccagttcaaacaatattttggctacgcgctc

SEQ ID NO: 844 - protein, 321 aa, synthetic construct
  REGION 1..321: note = Variant of adenosine kinase
MHHHHHHGGSGMSALICGSLAYDTIMVFPDQFKNHILPDRVHRLNVSFLVPRMRREFGGCAGNIAYNLHLLGGAPIVMATVGQDFGPYREHFETLGIDLSRVKIIDDLSTPQAFITTDHDHNQITAFHPGAMMRSYENHVRDVPGVTLGLVGPDGREGMIQNAEEFAAGGIPFIFDPGQALPLFNGPELREFIEQADYVVVNDYESNLLQTRTGWNEQDIVSRVQAYITTQGSKGALVHTPEKTYDIPPAHERRVMDPTGCGDAFRAGLIYGIQHNYDWLTIGRMGNLMGALKVEHPGTQNQRFDFAEFNDQFKQYFGYAL

SEQ ID NO: 845 - DNA, 963 bp, synthetic construct
  misc_feature 1..963: note = Variant of adenosine kinase
  source 1..963: mol_type = other DNA
atgcaccatcatcaccatcacgggggctccggcatgagtgcactgatttgcggttctttagcgtatgataccatcatggtgtttccggaccagttcaagaaccatattctgcccgatcgtgttcaccgcctcaatgtcagctttcttgtaccacgcatgcgtcgtgaatttggaggctgtgccggcaacattgcgtacaatctgcatctgttgggtggtgctccgatcgtaatggctacggtgggccaagatttcggtccgtatcgcgagcacttcgaaactctgggcattgacttatcccgcgtcaagatcatcgatgatctgagtacaccgcaggccttcattaccaccgacatggatcataaccagattacggcgtttcatccaggcgcaatgatgcgttcgtacgaaaatcacgttcgtgatgtgccgggtgttaccttgggcctcgtaggtcctgatggacgcgagggcatgatccaaaatgccgaagaatttgctgctggtggcattccgttcatttttgacccaggtcaggcagtgccgctgttcaacggccccgaactgcgcgagtttatcgaacaggcggactatgtggtggtcaacgattacgaaagcaatcttcttcaaacgcgtactggctggaacgagcaggacattgtttcacgcgtgcaggcgtatatcaccacgcaaggttcggctggagccctggtacatacaccggagaagacctacgatattccgccggcacacgaacgtcgtgtcgttgatccaactggttgcggcgacgcgtttcgcgccggcctgatctatggtattcagcataattatgattggttgaccattggccgcatgggaaacttaatgggtgcgctgaaagtggaacaccctggcacccaaaatcagcgtttcgattttgccgaattcaacgaccagttcaaacaatattttggctacgcgctc

SEQ ID NO: 846 - protein, 321 aa, synthetic construct
  REGION 1..321: note = Variant of adenosine kinase
MHHHHHHGGSGMSALICGSLAYDTIMVFPDQFKNHILPDRVHRLNVSFLVPRMRREFGGCAGNIAYNLHLLGGAPIVMATVGQDFGPYREHFETLGIDLSRVKIIDDLSTPQAFITTDMDHNQITAFHPGAMMRSYENHVRDVPGVTLGLVGPDGREGMIQNAEEFAAGGIPFIFDPGQAVPLFNGPELREFIEQADYVVVNDYESNLLQTRTGWNEQDIVSRVQAYITTQGSAGALVHTPEKTYDIPPAHERRVVDPTGCGDAFRAGLIYGIQHNYDWLTIGRMGNLMGALKVEHPGTQNQRFDFAEFNDQFKQYFGYAL

SEQ ID NO: 847 - DNA, 963 bp, synthetic construct
  misc_feature 1..963: note = Variant of adenosine kinase
  source 1..963: mol_type = other DNA
atgcaccatcatcaccatcacgggggctccggcatgagtgcactgatttgcggttctttcgcgtatgataccatcatggtgtttccggaccagttcaagaaccatattctgcccgatcgtgttcaccgcctcaatgtcagctttcttgtaccacgcatgcgtcgtgaatttggaggctgtgccggcaacattgcgtacaatctgcatctgttgggtggtgctccgatcgtaatggctacggtgggccaagatttcggtccgtatcgcgagcacttcgaaactctgggcattgacttatcccgcgtcaagatcatcgatgatctgagtacaccgcaggccttcattaccaccgaccatgatcataaccagattacggcgtttcatccaggcgcaatgatgcgttcgtacgaaaatcacgttcgtgatgtgccgggtgttaccttgggcctcgtaggtcctgatggacgcgagggcatgatccaaaatgccgaagaatttgctgctggtggcattccgttcatttttgacccaggtcaggcactgccgctgttcaacggccccgaactgcgcgagtttatcgaacaggcggactatgtggtggtcaacgattacgaaagcaatcttcttcaaacgcgtactggctggaacgagcaggacattgtttcacgcgtgcaggcgtatatcgttacgcaaggttcgaaaggagccctggtacatacaccggagaagacctacgatattccgccggcacacgaacgtcgtgtcgttgatccaactggttgcggcgacgcgtttcgcgccggcctgatctatggtattcagcataattatgattggttgaccattggccgcatgggaaacttaatgggtgcgctgaaagtggaacaccctggcacgcaaaatcagcgtttcgattttgccgaattcaacgaccagttcaaacaatattttggctacgcgctc

SEQ ID NO: 848 - protein, 321 aa, synthetic construct
  REGION 1..321: note = Variant of adenosine kinase
MHHHHHHGGSGMSALICGSFAYDTIMVFPDQFKNHILPDRVHRLNVSFLVPRMRREFGGCAGNIAYNLHLLGGAPIVMATVGQDFGPYREHFETLGIDLSRVKIIDDLSTPQAFITTDHDHNQITAFHPGAMMRSYENHVRDVPGVTLGLVGPDGREGMIQNAEEFAAGGIPFIFDPGQALPLFNGPELREFIEQADYVVVNDYESNLLQTRTGWNEQDIVSRVQAYIVTQGSKGALVHTPEKTYDIPPAHERRVVDPTGCGDAFRAGLIYGIQHNYDWLTIGRMGNLMGALKVEHPGTQNQRFDFAEFNDQFKQYFGYAL

SEQ ID NO: 849 - DNA, 963 bp, synthetic construct
  misc_feature 1..963: note = Variant of adenosine kinase
  source 1..963: mol_type = other DNA
atgcaccatcatcaccatcacgggggctccggcatgagtgcactgatttgcggttctctggcgtatgataccatcatggtgtttccggaccagttcaagaaccatattctgcccgatcgtgttcaccgcctcaatgtcagctttcttgtaccacgcatgcgtcgtttttttggaggctgtgccggcaacattgcgtacaatctgcatctgttgggtggtgctccgatcgtaatggctacggtgggccaagatttcggtccgtatcgcgagcacttcgaaactctgggcattgacttatcccgcgtcaagatcatcgatgatctgagtacaccgcaggccttcattaccaccgaccatgatatgaaccagattacggcgtttcatccaggcgcaatgatgcgttcgtacgaaaatcacgttcgtgatgtgccgggtgttaccttgggcctcgtaggtcctgatggatatgagggcatgatccaaaatgccgaagaatttgctgctggtggcattccgttcatttttgacccaggtcaggcactgccgctgttcaacggccccgaactgcgcgagtttatcgaacaggcggactatgtggtggtcaacgattacgaaagcaatcttcttcaaacgcgtactggctggaacgagcaggacattgtttcacgcgtgcaggcgtatatcaccacgcaaggttcgaaaggagccgtggtacatacaccggagaagacctacgatattccgccggcacacgaacgtcgcgtcgttgatccaactggttgcggcgacgcgtttcgcgccggcctgatctatggtattcagcataattatgattggttgaccattggccgcatgggaaacttaatgggtgcgctgaaagtggaacaccctggcacgcaaaatcagcgtttcgattttgccgaattcaacgaccagttcaaacaatattttggctacgcgctc

SEQ ID NO: 850 - protein, 321 aa, synthetic construct
  REGION 1..321: note = Variant of adenosine kinase
MHHHHHHGGSGMSALICGSLAYDTIMVFPDQFKNHILPDRVHRLNVSFLVPRMRRFFGGCAGNIAYNLHLLGGAPIVMATVGQDFGPYREHFETLGIDLSRVKIIDDLSTPQAFITTDHDMNQITAFHPGAMMRSYENHVRDVPGVTLGLVGPDGYEGMIQNAEEFAAGGIPFIFDPGQALPLFNGPELREFIEQADYVVVNDYESNLLQTRTGWNEQDIVSRVQAYITTQGSKGAVVHTPEKTYDIPPAHERRVVDPTGCGDAFRAGLIYGIQHNYDWLTIGRMGNLMGALKVEHPGTQNQRFDFAEFNDQFKQYFGYAL

SEQ ID NO: 851 - DNA, 963 bp, synthetic construct
  misc_feature 1..963: note = Variant of adenosine kinase
  source 1..963: mol_type = other DNA
atgcaccatcatcaccatcacgggggctccggcatgagtgcactgatttgcggttctctggcgtatgataccatcatggtgtttccggaccagttcaagaaccatattctgcccgatcgtgttcaccgcctcaatgtcagctttcttgtaccacgcatgcgtcgtttttttggaggctgtgccggcaacattgcgtacaatctgcatctgttgggtggtgctccgatcgtaatggctacggtgggccaagatttcggtccgtatcgcgagcacttcgaaactctgggcattgacttatcccgcgtcaagatcatcgatgatctgagtacaccgcaggccttcattaccaccgaccatgatcacaaccagattacggcgtttcatccaggcgcaatgatgcgttcgtacgaaaatcacgttcgtgatgtgccgggtgttaccttgggcctcgtaggtcctgatggatatgagggcatgatccaaaatgccgaagaatttgctgctggtggcattccgttcatttttgacccaggtcaggcactgccgctgttcaacggccccgaactgcgcgagtttatcgaacaggcggactatgtggtggtcaacgattacgaaagcaatcttcttcaaacgcgtactggctggaacgagcaggacattgtttcacgcgtgcaggcgtatatcgttacgcaaggttcgaaaggagccctggtacatacaccggagaagacctacgatattccgccggcacacgaacgtcgcgtcgttgatccaactggttgcggcgacgcgtttcgcgccggcctgatctatggtattcagcataattatgattggttgaccattggccgcatgggaaacttaatgggtgcgctgaaagtggaacaccctggcacgcaaaatcagcgtttcgattttgccgaattcaacgaccagttcaaacaatattttggctacgcgctc

SEQ ID NO: 852 - protein, 321 aa, synthetic construct
  REGION 1..321: note = Variant of adenosine kinase
MHHHHHHGGSGMSALICGSLAYDTIMVFPDQFKNHILPDRVHRLNVSFLVPRMRRFFGGCAGNIAYNLHLLGGAPIVMATVGQDFGPYREHFETLGIDLSRVKIIDDLSTPQAFITTDHDHNQITAFHPGAMMRSYENHVRDVPGVTLGLVGPDGYEGMIQNAEEFAAGGIPFIFDPGQALPLFNGPELREFIEQADYVVVNDYESNLLQTRTGWNEQDIVSRVQAYIVTQGSKGALVHTPEKTYDIPPAHERRVVDPTGCGDAFRAGLIYGIQHNYDWLTIGRMGNLMGALKVEHPGTQNQRFDFAEFNDQFKQYFGYAL

SEQ ID NO: 853 - DNA, 963 bp, synthetic construct
  misc_feature 1..963: note = Variant of adenosine kinase
  source 1..963: mol_type = other DNA
atgcaccatcatcaccatcacgggggctccggcatgagtgcactgatttgcggttctttcgcgtatgataccatcatggtgtttccggaccagttcaagaaccatattctgcccgatcgtgttcaccgcctcaatgtcagctttcttgtaccacgcatgcgtcgtgggtttggaggctgtgccggcaacattgcgtacaatctgcatctgttgggtggtgctccgatcgtaatggctacggtgggccaagatttcggtccgtatcgcgagcacttcgaaactctgggcattgacttatcccgcgtcaagatcatcgatgatctgagtacaccgcaggccttcattaccaccgaccatgatcacaaccagattacggcgtttcatccaggcgcaatgatgcgttcgtacgaaaatcacgttcgtgatgtgccgggtgttaccttgggcctcgtaggtcctgatggatatgagggcatgatccaaaatgccgaagaatttgctgctggtggcattccgttcatttttgacccaggtcaggcactgccgctgttcaacggccccgaactgcgcgagtttatcgaacaggcggactatgtggtggtcaacgattacgaaagcaatcttcttcaaacgcgtactggctggaacgagcaggacattgtttcacgcgtgcaggcgtatatcgttacgcaaggttcgaaaggagccgtggtacatacaccggagaagacctacgatattccgccggcacacgaacgtcgcgtcgttgatccaactggttgcggcgacgcgtttcgcgccggcctgatctatggtattcagcataattatgattggttgaccattggccgcatgggaaacttaatgggtgcgctgaaagtggcacaccctggcacgcaaaatcagcgtttcgattttgccgaattcaacgaccagttcaaacaatattttggctacgcgctc

SEQ ID NO: 854 - protein, 321 aa, synthetic construct
  REGION 1..321: note = Variant of adenosine kinase
MHHHHHHGGSGMSALICGSFAYDTIMVFPDQFKNHILPDRVHRLNVSFLVPRMRRGFGGCAGNIAYNLHLLGGAPIVMATVGQDFGPYREHFETLGIDLSRVKIIDDLSTPQAFITTDHDHNQITAFHPGAMMRSYENHVRDVPGVTLGLVGPDGYEGMIQNAEEFAAGGIPFIFDPGQALPLFNGPELREFIEQADYVVVNDYESNLLQTRTGWNEQDIVSRVQAYIVTQGSKGAVVHTPEKTYDIPPAHERRVVDPTGCGDAFRAGLIYGIQHNYDWLTIGRMGNLMGALKVAHPGTQNQRFDFAEFNDQFKQYFGYAL

SEQ ID NO: 855 - DNA, 963 bp, synthetic construct
  misc_feature 1..963: note = Variant of adenosine kinase
  source 1..963: mol_type = other DNA
atgcaccatcatcaccatcacgggggctccggcatgagtgcactgatttgcggttctctggcgtatgataccatcatggtgtttccggaccagttcaagaaccatattctgcccgatcgtgttcaccgcctcaatgtcagctttcttgtaccacgcatgcgtcgtttttttggaggctgtgccggcaacattgcgtacaatctgcatctgttgggtggtgctccgatcgtaatggctacggtgggccaagatttcggtccgtatcgcgagcacttcgaaactctgggcattgacttatcccgcgtcaagatcatcgatgatctgagtacaccgcaggccttcattaccaccgaccatgatcacaaccagattacggcgtttcatccaggcgcaatgatgcgttcgtacgaaaatcacgttcgtgatgtgccgggtgttaccttgggcctcgtaggtcctgatggacgcgagggcatgatccaaaatgccgaagaatttgctgctggtggcattccgttcatttttgacccaggtcaggcactgccgctgttcaacggccccgaactgcgcgagtttatcgaacaggcggactatgtggtggtcaacgattacgaaagcaatcttcttcaaacgcgtactggctggaacgagcaggacattgtttcacgcgtgcaggcgtatatcgttacgcaaggttcgaaaggagccctggtacatacaccggagaagacctacgatattccgccggcacacgaacgtctggtcgttgatccaactggttgcggcgacgcgtttcgcgccggcctgatctatggtattcagcataattatgattggttgaccattggccgcatgggaaacttaatgggtgcgctgaaagtggaacaccctggcacgcaaaatcagcgtttcgattttgccgaattcaacgaccagttcaaacaatattttggctacgcgctc

SEQ ID NO: 856 - protein, 321 aa, synthetic construct
  REGION 1..321: note = Variant of adenosine kinase
MHHHHHHGGSGMSALICGSLAYDTIMVFPDQFKNHILPDRVHRLNVSFLVPRMRRFFGGCAGNIAYNLHLLGGAPIVMATVGQDFGPYREHFETLGIDLSRVKIIDDLSTPQAFITTDHDHNQITAFHPGAMMRSYENHVRDVPGVTLGLVGPDGREGMIQNAEEFAAGGIPFIFDPGQALPLFNGPELREFIEQADYVVVNDYESNLLQTRTGWNEQDIVSRVQAYIVTQGSKGALVHTPEKTYDIPPAHERLVVDPTGCGDAFRAGLIYGIQHNYDWLTIGRMGNLMGALKVEHPGTQNQRFDFAEFNDQFKQYFGYAL

SEQ ID NO: 857 - DNA, 963 bp, synthetic construct
  misc_feature 1..963: note = Variant of adenosine kinase
  source 1..963: mol_type = other DNA
atgcaccatcatcaccatcacgggggctccggcatgagtgcactgatttgcggttctttcgcgtatgataccatcatggtgtttccggaccagttcaagaaccatattctgcccgatcgtgttcaccgcctcaatgtcagctttcttgtaccacgcatgcgtcgtttttttggaggctgtgccggcaacattgcgtacaatctgcatctgttgggtggtgctccgatcgtaatggctacggtgggccaagatttcggtccgtatcgcgagcacttcgaaactctgggcattgacttatcccgcgtcaagatcatcgatgatctgagtacaccgcaggccttcattaccaccgaccatgatatgaaccagattacggcgtttcatccaggcgcaatgatgcgttcgtacgaaaatcacgttcgtgatgtgccgggtgttaccttgggcctcgtaggtcctgatggacgcgagggcatgatccaaaatgccgaagaatttgctgctggtggcattccgttcatttttgacccaggtcaggcactgccgctgttcaacggccccgaactgcgcgagtttatcgaacaggcggactatgtggtggtcaacgattacgaaagcaatcttcttcaaacgcgtactggctggaacgagcaggacattgtttcacgcgtgcaggcgtatatcacgacgcaaggttcgaaaggagccgtggtacatacaccggagaagacctacgatattccgccggcacacgaacgtcgcgtcgttgatccaactggttgcggcgacgcgtttcgcgccggcctgatctatggtattcagcataattatgattggttgaccattggccgcatgggaaacttaatgggtgcgctgaaagtggaacaccctggcacgcaaaatcagcgtttcgattttgccgaattcaacgaccagttcaaacaatattacggctacgcgctc

SEQ ID NO: 858 - protein, 321 aa, synthetic construct
  REGION 1..321: note = Variant of adenosine kinase
MHHHHHHGGSGMSALICGSFAYDTIMVFPDQFKNHILPDRVHRLNVSFLVPRMRRFFGGCAGNIAYNLHLLGGAPIVMATVGQDFGPYREHFETLGIDLSRVKIIDDLSTPQAFITTDHDMNQITAFHPGAMMRSYENHVRDVPGVTLGLVGPDGREGMIQNAEEFAAGGIPFIFDPGQALPLFNGPELREFIEQADYVVVNDYESNLLQTRTGWNEQDIVSRVQAYITTQGSKGAVVHTPEKTYDIPPAHERRVVDPTGCGDAFRAGLIYGIQHNYDWLTIGRMGNLMGALKVEHPGTQNQRFDFAEFNDQFKQYYGYAL

SEQ ID NO: 859 - DNA, 963 bp, synthetic construct
  misc_feature 1..963: note = Variant of adenosine kinase
  source 1..963: mol_type = other DNA
atgcaccatcatcaccatcacgggggctccggcatgagtgcactgatttgcggttctttcgcgtatgataccatcatggtgtttccggaccagttcaagaaccatattctgcccgatcgtgttcaccgcctcaatgtcagctttcttgtaccacgcatgcgtcgtttttttggaggctgtgccggcaacattgcgtacaatctgcatctgttgggtggtgctccgatcgtaatggctacggtgggccaagatttcggtccgtatcgcgagcacttcgaaactctgggcattgacttatcccgcgtcaagatcatcgatgatctgagtacaccgcaggccttcattaccaccgaccatgatcacaaccagattacggcgtttcatccaggcgcaatgatgcgttcgtacgaaaatcacgttcgtgatgtgccgggtgttaccttgggcctcgtaggtcctgatggacgcgagggcatgatccaaaatgccgaagaatttgctgctggtggcattccgttcatttttgacccaggtcaggcactgccgctgttcaacggccccgaactgcgcgagtttatcgaacaggcggactatgtggtggtcaacgattacgaaagcaatcttcttcaaacgcgtactggctggaacgagcaggacattgtttcacgcgtgcaggcgtatatcgttacgcaaggttcgaaaggagccctggtacatacaccggagaagacctacgatattccgccggcacacgaacgtcgtgtcgttgatccaactggttgcggcgacgcgtttcgcgccggcctgatctatggtattcagcataattatgattggttgaccattggccgcatgggaaacttaatgggtgcgctgaaagtggaacaccctggcacgcaaaatcagcgtttcgattttgccgaattcaacgaccagttcaaacaatattttggctacgcgctc

SEQ ID NO: 860 - protein, 321 aa, synthetic construct
  REGION 1..321: note = Variant of adenosine kinase
MHHHHHHGGSGMSALICGSFAYDTIMVFPDQFKNHILPDRVHRLNVSFLVPRMRRFFGGCAGNIAYNLHLLGGAPIVMATVGQDFGPYREHFETLGIDLSRVKIIDDLSTPQAFITTDHDHNQITAFHPGAMMRSYENHVRDVPGVTLGLVGPDGREGMIQNAEEFAAGGIPFIFDPGQALPLFNGPELREFIEQADYVVVNDYESNLLQTRTGWNEQDIVSRVQAYIVTQGSKGALVHTPEKTYDIPPAHERRVVDPTGCGDAFRAGLIYGIQHNYDWLTIGRMGNLMGALKVEHPGTQNQRFDFAEFNDQFKQYFGYAL

SEQ ID NO: 861 - DNA, 963 bp, synthetic construct
  misc_feature 1..963: note = Variant of adenosine kinase
  source 1..963: mol_type = other DNA
atgcaccatcatcaccatcacgggggctccggcatgagtgcactgatttgcggttctttagcgtatgataccatcatggtgtttccggaccagttcaagaaccatattctgcccgatcgtgttcaccgcctcaatgtcagctttcttgtaccacgcatgcgtcgtgaatttggaggctgtgccggcaacattgcgtacaatctgcatctgttgggtggtgctccgatcgtaatggctacggtgggccaagatttcggtccgtatcgcgagcacttcgaaactctgggcattgacttatcccgcgtcaagatcatcgatgatctgagtacaccgcaggccttcattaccaccgaccgcgatcataaccagattacggcgtttcatccaggcgcaatgatgcgttcgtacgaaaatcacgttcgtgatgtgccgggtgttaccttgggcctcgtaggtcctgatggacgcgagggcatgatccaaaatgccgaagaatttgctgctggtggcattccgttcatttttgacccaggtcaggcagtgccgctgttcaacggccccgaactgcgcgagtttatcgaacaggcggactatgtggtggtcaacgattacgaaagcaatcttcttcaaacgcgtactggctggaacgagcaggacattgtttcacgcgtgcaggcgtatatcaccacgcaaggttcggctggagccctggtacatacaccggagaagacctacgatattccgccggctcacgaacgtcgtgtcgttgatccaactggttgcggcgacgcgtttcgcgccggcctgatctatggtattcagcataattatgattggttgaccattggccgcatgggaaacttaatgggtgcgctgaaagtggaacaccctggcacgcaaaatcagcgtttcgattttgccgaattcaacgaccagttcaaacaatattttggctacgcgctc

SEQ ID NO: 862 - protein, 321 aa, synthetic construct
  REGION 1..321: note = Variant of adenosine kinase
MHHHHHHGGSGMSALICGSLAYDTIMVFPDQFKNHILPDRVHRLNVSFLVPRMRREFGGCAGNIAYNLHLLGGAPIVMATVGQDFGPYREHFETLGIDLSRVKIIDDLSTPQAFITTDRDHNQITAFHPGAMMRSYENHVRDVPGVTLGLVGPDGREGMIQNAEEFAAGGIPFIFDPGQAVPLFNGPELREFIEQADYVVVNDYESNLLQTRTGWNEQDIVSRVQAYITTQGSAGALVHTPEKTYDIPPAHERRVVDPTGCGDAFRAGLIYGIQHNYDWLTIGRMGNLMGALKVEHPGTQNQRFDFAEFNDQFKQYFGYAL

SEQ ID NO: 863 - DNA, 963 bp, synthetic construct
  misc_feature 1..963: note = Variant of adenosine kinase
  source 1..963: mol_type = other DNA
atgcaccatcatcaccatcacgggggctccggcatgagtgcactgatttgcggttctttagcgtatgataccatcatggtgtttccggaccagttcaagaaccatattctgcccgatcgtgttcaccgcctcaatgtcagctttcttgtaccacgcatgcgtcgtgaatttggaggctgtgccggcaacattgcgtacaatctgcatctgttgggtggtgctccgatcgtaatggctacggtgggccaagatttcggtccgtatcgcgagcacttcgaaactctgggcattgacttatcccgcgtcaagatcatcgatgatctgagtacaccgcaggccttcattaccaccgaccgcgatcataaccagattacggcgtttcatccaggcgcaatgatgcgttcgtacgaaaatcacgttcgtgatgtgccgggtgttaccttgggcctcgtaggtcctgatggacgcgagggcatgatccaaaatgccgaagaatttgctgctggtggcattccgttcatttttgacccaggtcaggcactgccgctgttcaacggccccgaactgcgcgagtttatcgaacaggcggactatgtggtggtcaacgattacgaaagcaatcttcttcaaacgcgtactggctggaacgagcaggacattgtttcacgcgtgcaggcgtatatcaccacgcaaggttcgaaaggagccctggtacatacaccggagaagacctacgatattccgccggcacacgaacgtcgtgtcgttgatccaactggttgcggcgacgcgtttcgcgccggcctgatctatggtattcagcataattatgattggttgaccattggccgcatgggaaacttaatgggtgcgctgaaagtggaacaccctggcacgcaaaatcagcgtttcgattttgccgaattcaacgaccagttcaaacaatattttggctacgcgctc

SEQ ID NO: 864 - protein, 321 aa, synthetic construct
  REGION 1..321: note = Variant of adenosine kinase
MHHHHHHGGSGMSALICGSLAYDTIMVFPDQFKNHILPDRVHRLNVSFLVPRMRREFGGCAGNIAYNLHLLGGAPIVMATVGQDFGPYREHFETLGIDLSRVKIIDDLSTPQAFITTDRDHNQITAFHPGAMMRSYENHVRDVPGVTLGLVGPDGREGMIQNAEEFAAGGIPFIFDPGQALPLFNGPELREFIEQADYVVVNDYESNLLQTRTGWNEQDIVSRVQAYITTQGSKGALVHTPEKTYDIPPAHERRVVDPTGCGDAFRAGLIYGIQHNYDWLTIGRMGNLMGALKVEHPGTQNQRFDFAEFNDQFKQYFGYAL

SEQ ID NO: 865 - DNA, 963 bp, synthetic construct
  misc_feature 1..963: note = Variant of adenosine kinase
  source 1..963: mol_type = other DNA
atgcaccatcatcaccatcacgggggctccggcatgagtgcactgatttgcggttctttagcgtatgataccatcatggtgtttccggaccagttcaagaaccatattctgcccgatcgtgttcaccgcctcaatgtcagctttcttgtaccacgcatgcgtcgtgaatttggaggctgtgccggcaacattgcgtacaatctgcatctgttgggtggtgctccgatcgtaatggctacggtgggccaagatttcggtccgtatcgcgagcacttcgaaactctgggcattgacttatcccgcgtcaagatcatcgatgatctgagtacaccgcaggccttcattaccaccgaccatgatcacaaccagattacggcgtttcatccaggcgcaatgatgcgttcgtacgaaaatcacgttcgtgatgtgccgggtgttaccttgggcctcgtaggtcctgatggatatgagggcatgatccaaaatgccgaagaatttgctgctggtggcattccgttcatttttgacccaggtcaggcactgccgctgttcaacggccccgaactgcgcgagtttatcgaacaggcggactatgtggtggtcaacgattacgaaagcaatcttcttcaaacgcgtactggctggaacgagcaggacattgtttcacgcgtgcaggcgtatatcacgacgcaaggttcgaaaggagccctggtacatacaccggagaagacctacgatattccgccggcacacgaacgtcgtgtcgttgatccaactggttgcggcgacgcgtttcgcgccggcctgatctatggtattcagcataattatgattggttgaccattggccgcatgggaaacttaatgggtgcgctgaaagtggaacaccctggcacgcaaaatcagcgtttcgattttgccgaattcaacgaccagttcaaacaatattttggctacgcgctc

SEQ ID NO: 866 - protein, 321 aa, synthetic construct
  REGION 1..321: note = Variant of adenosine kinase
MHHHHHHGGSGMSALICGSLAYDTIMVFPDQFKNHILPDRVHRLNVSFLVPRMRREFGGCAGNIAYNLHLLGGAPIVMATVGQDFGPYREHFETLGIDLSRVKIIDDLSTPQAFITTDHDHNQITAFHPGAMMRSYENHVRDVPGVTLGLVGPDGYEGMIQNAEEFAAGGIPFIFDPGQALPLFNGPELREFIEQADYVVVNDYESNLLQTRTGWNEQDIVSRVQAYITTQGSKGALVHTPEKTYDIPPAHERRVVDPTGCGDAFRAGLIYGIQHNYDWLTIGRMGNLMGALKVEHPGTQNQRFDFAEFNDQFKQYFGYAL

SEQ ID NO: 867 - DNA, 963 bp, synthetic construct
  misc_feature 1..963: note = Variant of adenosine kinase
  source 1..963: mol_type = other DNA
atgcaccatcatcaccatcacgggggctccggcatgagtgcactgatttgcggttctctggcgtatgataccatcatggtgtttccggaccagttcaagaaccatattctgcccgatcgtgttcaccgcctcaatgtcagctttcttgtaccacgcatgcgtcgtgagtttggaggctgtgccggcaacattgcgtacaatctgcatctgttgggtggtgctccgatcgtaatggctacggtgggccaagatttcggtccgtatcgcgagcacttcgaaactctgggcattgacttatcccgcgtcaagatcatcgatgatctgagtacaccgcaggccttcattaccaccgaccatgatcacaaccagattacggcgtttcatccaggcgcaatgatgcgttcgtacgaaaatcacgttcgtgatgtgccgggtgttaccttgggcctcgtaggtcctgatggatatgagggcatgatccaaaatgccgaagaatttgctgctggtggcattccgttcatttttgacccaggtcaggcactgccgctgttcaacggccccgaactgcgcgagtttatcgaacaggcggactatgtggtggtcaacgattacgaaagcaatcttcttcaaacgcgtactggctggaacgagcaggacattgtttcacgcgtgcaggcgtatatcacgacgcaaggttcgaaaggagccgtggtacatacaccggagaagacctacgatattccgccggcacacgaacgtcgcgtcgttgatccaactggttgcggcgacgcgtttcgcgccggcctgatctatggtattcagcataattatgattggttgaccattggccgcatgggaaacttaatgggtgcgctgaaagtggcacaccctggcacgcaaaatcagcgtttcgattttgccgaattcaacgaccagttcaaacaatattttggctacgcgctc

SEQ ID NO: 868 - protein, 321 aa, synthetic construct
  REGION 1..321: note = Variant of adenosine kinase
MHHHHHHGGSGMSALICGSLAYDTIMVFPDQFKNHILPDRVHRLNVSFLVPRMRREFGGCAGNIAYNLHLLGGAPIVMATVGQDFGPYREHFETLGIDLSRVKIIDDLSTPQAFITTDHDHNQITAFHPGAMMRSYENHVRDVPGVTLGLVGPDGYEGMIQNAEEFAAGGIPFIFDPGQALPLFNGPELREFIEQADYVVVNDYESNLLQTRTGWNEQDIVSRVQAYITTQGSKGAVVHTPEKTYDIPPAHERRVVDPTGCGDAFRAGLIYGIQHNYDWLTIGRMGNLMGALKVAHPGTQNQRFDFAEFNDQFKQYFGYAL

SEQ ID NO: 869 - DNA, 963 bp, synthetic construct
  misc_feature 1..963: note = Variant of adenosine kinase
  source 1..963: mol_type = other DNA
atgcaccatcatcaccatcacgggggctccggcatgagtgcactgatttgcggttctttcgcgtatgataccatcatggtgtttccggaccagttcaagaaccatattctgcccgatcgtgttcaccgcctcaatgtcagctttcttgtaccacgcatgcgtcgtttttttggaggctgtgccggcaacattgcgtacaatctgcatctgttgggtggtgctccgatcgtaatggctacggtgggccaagatttcggtccgtatcgcgagcacttcgaaactctgggcattgacttatcccgcgtcaagatcatcgatgatctgagtacaccgcaggccttcattaccaccgaccatgatatgaaccagattacggcgtttcatccaggcgcaatgatgcgttcgtacgaaaatcacgttcgtgatgtgccgggtgttaccttgggcctcgtaggtcctgatggacgcgagggcatgatccaaaatgccgaagaatttgctgctggtggcattccgttcatttttgacccaggtcaggcactgccgctgttcaacggccccgaactgcgcgagtttatcgaacaggcggactatgtggtggtcaacgattacgaaagcaatcttcttcaaacgcgtactggctggaacgagcaggacattgtttcacgcgtgcaggcgtatatcaccacgcaaggttcgaaaggagccctggtacatacaccggagaagacctacgatattccgccggcacacgaacgtcgtgtcgttgatccaactggttgcggcgacgcgtttcgcgccggcctgatctatggtattcagcataattatgattggttgaccattggccgcatgggaaacttaatgggtgcgctgaaagtggaacaccctggcacgcaaaatcagcgtttcgattttgccgaattcaacgaccagttcaaacaatattttggctacgcgctc

SEQ ID NO: 870 - protein, 321 aa, synthetic construct
  REGION 1..321: note = Variant of adenosine kinase
MHHHHHHGGSGMSALICGSFAYDTIMVFPDQFKNHILPDRVHRLNVSFLVPRMRRFFGGCAGNIAYNLHLLGGAPIVMATVGQDFGPYREHFETLGIDLSRVKIIDDLSTPQAFITTDHDMNQITAFHPGAMMRSYENHVRDVPGVTLGLVGPDGREGMIQNAEEFAAGGIPFIFDPGQALPLFNGPELREFIEQADYVVVNDYESNLLQTRTGWNEQDIVSRVQAYITTQGSKGALVHTPEKTYDIPPAHERRVVDPTGCGDAFRAGLIYGIQHNYDWLTIGRMGNLMGALKVEHPGTQNQRFDFAEFNDQFKQYFGYAL

SEQ ID NO: 871 - DNA, 963 bp, synthetic construct
  misc_feature 1..963: note = Variant of adenosine kinase
  source 1..963: mol_type = other DNA
atgcaccatcatcaccatcacgggggctccggcatgagtgcactgatttgcggttctttagcgtatgataccatcatggtgtttccggaccagttcaagaaccatattctgcccgatcgtgttcaccgcctcaatgtcagctttcttgtaccacgcatgcgtcgtgaatttggaggctgtgccggcaacattgcgtacaatctgcatctgttgggtggtgctccgatcgtaatggctacggtgggccaagatttcggtccgtatcgcgagcacttcgaaactctgggcattgacttatcccgcgtcaagatcatcgatgatctgagtacaccgcaggccttcattaccaccgacatggatcataaccagattacggcgtttcatccaggcgcaatgatgcgttcgtacgaaaatcacgttcgtgatgtgccgggtgttaccttgggcctcgtaggtcctgatggacgcgagggcatgatccaaaatgccgaagaatttgctgctggtggcattccgttcatttttgacccaggtcaggcagtgccgctgttcaacggccccgaactgcgcgagtttatcgaacaggcggactatgtggtggtcaacgattacgaaagcaatcttcttcaaacgcgtactggctggaacgagcaggacattgtttcacgcgtgcaggcgtatatcaccacgcaaggttcgaaaggagccctggtacatacaccggagaagacctacgatattccgccggcacacgaacgtcgtgtcgttgatccaactggttgcggcgacgcgtttcgcgccggcctgatctatggtattcagcataattatgattggttgaccattggccgcatgggaaacttaatgggtgcgctgaaagtggaacaccctggcacgcaaaatcagcgtttcgattttgccgaattcaacgaccagttcaaacaatattttggctacgcgctc

SEQ ID NO: 872 - protein, 321 aa, synthetic construct
  REGION 1..321: note = Variant of adenosine kinase
MHHHHHHGGSGMSALICGSLAYDTIMVFPDQFKNHILPDRVHRLNVSFLVPRMRREFGGCAGNIAYNLHLLGGAPIVMATVGQDFGPYREHFETLGIDLSRVKIIDDLSTPQAFITTDMDHNQITAFHPGAMMRSYENHVRDVPGVTLGLVGPDGREGMIQNAEEFAAGGIPFIFDPGQAVPLFNGPELREFIEQADYVVVNDYESNLLQTRTGWNEQDIVSRVQAYITTQGSKGALVHTPEKTYDIPPAHERRVVDPTGCGDAFRAGLIYGIQHNYDWLTIGRMGNLMGALKVEHPGTQNQRFDFAEFNDQFKQYFGYAL

SEQ ID NO: 873 - DNA, 963 bp, synthetic construct
  misc_feature 1..963: note = Variant of adenosine kinase
  source 1..963: mol_type = other DNA
atgcaccatcatcaccatcacgggggctccggcatgagtgcactgatttgcggttctttcgcgtatgataccatcatggtgtttccggaccagttcaagaaccatattctgcccgatcgtgttcaccgcctcaatgtcagctttcttgtaccacgcatgcgtcgtgggtttggaggctgtgccggcaacattgcgtacaatctgcatctgttgggtggtgctccgatcgtaatggctacggtgggccaagatttcggtccgtatcgcgagcacttcgaaactctgggcattgacttatcccgcgtcaagatcatcgatgatctgagtacaccgcaggccttcattaccaccgaccatgatcacaaccagattacggcgtttcatccaggcgcaatgatgcgttcgtacgaaaatcacgttcgtgatgtgccgggtgttaccttgggcctcgtaggtcctgatggacgcgagggcatgatccaaaatgccgaagaatttgctgctggtggcattccgttcatttttgacccaggtcaggcactgccgctgttcaacggccccgaactgcgcgagtttatcgaacaggcggactatgtggtggtcaacgattacgaaagcaatcttcttcaaacgcgtactggctggaacgagcaggacattgtttcacgcgtgcaggcgtatatcgttacgcaaggttcgaaaggagccctggtacatacaccggagaagacctacgatattccgccggcacacgaacgtctggtcgttgatccaactggttgcggcgacgcgtttcgcgccggcctgatctatggtattcagcataattatgattggttgaccattggccgcatgggaaacttaatgggtgcgctgaaagtggaacaccctggcacgcaaaatcagcgtttcgattttgccgaattcaacgaccagttcaaacaatattttggctacgcgctc

SEQ ID NO: 874 - protein, 321 aa, synthetic construct
  REGION 1..321: note = Variant of adenosine kinase
MHHHHHHGGSGMSALICGSFAYDTIMVFPDQFKNHILPDRVHRLNVSFLVPRMRRGFGGCAGNIAYNLHLLGGAPIVMATVGQDFGPYREHFETLGIDLSRVKIIDDLSTPQAFITTDHDHNQITAFHPGAMMRSYENHVRDVPGVTLGLVGPDGREGMIQNAEEFAAGGIPFIFDPGQALPLFNGPELREFIEQADYVVVNDYESNLLQTRTGWNEQDIVSRVQAYIVTQGSKGALVHTPEKTYDIPPAHERLVVDPTGCGDAFRAGLIYGIQHNYDWLTIGRMGNLMGALKVEHPGTQNQRFDFAEFNDQFKQYFGYAL

SEQ ID NO: 875 - DNA, 963 bp, synthetic construct
  misc_feature 1..963: note = Variant of adenosine kinase
  source 1..963: mol_type = other DNA
atgcaccatcatcaccatcacgggggctccggcatgagtgcactgatttgcggttctttagcgtatgataccatcatggtgtttccggaccagttcaagaaccatattctgcccgatcgtgttcaccgcctcaatgtcagctttcttgtaccacgcatgcgtcgtttttttggaggctgtgccggcaacattgcgtacaatctgcatctgttgggtggtgctccgatcgtaatggctacggtgggccaagatttcggtccgtatcgcgagcacttcgaaactctgggcattgacttatcccgcgtcaagatcatcgatgatctgagtacaccgcaggccttcattaccaccgaccatgatcacaaccagattacggcgtttcatccaggcgcaatgatgcgttcgtacgaaaatcacgttcgtgatgtgccgggtgttaccttgggcctcgtaggtcctgatggacgcgagggcatgatccaaaatgccgaagaatttgctgctggtggcattccgttcatttttgacccaggtcaggcactgccgctgttcaacggccccgaactgcgcgagtttatcgaacaggcggactatgtggtggtcaacgattacgaaagcaatcttcttcaaacgcgtactggctggaacgagcaggacattgtttcacgcgtgcaggcgtatatcacgacgcaaggttcgaaaggagccctggtacatacaccggagaagacctacgatattccgccggcacacgaacgtcgcgtcgttgatccaactggttgcggcgacgcgtttcgcgccggcctgatctatggtattcagcataattatgattggttgaccattggccgcatgggaaacttaatgggtgcgctgaaagtggaacaccctggcacgcaaaatcagcgtttcgattttgccgaattcaacgaccagttcaaacaatatttcggctacgcgctc

SEQ ID NO: 876 - protein, 321 aa, synthetic construct
  REGION 1..321: note = Variant of adenosine kinase
MHHHHHHGGSGMSALICGSLAYDTIMVFPDQFKNHILPDRVHRLNVSFLVPRMRRFFGGCAGNIAYNLHLLGGAPIVMATVGQDFGPYREHFETLGIDLSRVKIIDDLSTPQAFITTDHDHNQITAFHPGAMMRSYENHVRDVPGVTLGLVGPDGREGMIQNAEEFAAGGIPFIFDPGQALPLFNGPELREFIEQADYVVVNDYESNLLQTRTGWNEQDIVSRVQAYITTQGSKGALVHTPEKTYDIPPAHERRVVDPTGCGDAFRAGLIYGIQHNYDWLTIGRMGNLMGALKVEHPGTQNQRFDFAEFNDQFKQYFGYAL

SEQ ID NO: 877 - DNA, 963 bp, synthetic construct
  misc_feature 1..963: note = Variant of adenosine kinase
  source 1..963: mol_type = other DNA
atgcaccatcatcaccatcacgggggctccggcatgagtgcactgatttgcggttctctggcgtatgataccatcatggtgtttccggaccagttcaagaaccatattctgcccgatcgtgttcaccgcctcaatgtcagctttcttgtaccacgcatgcgtcgtgaatttggaggctgtgccggcaacattgcgtacaatctgcatctgttgggtggtgctccgatcgtaatggctacggtgggccaagatttcggtccgtatcgcgagcacttcgaaactctgggcattgacttatcccgcgtcaagatcatcgatgatctgagtacaccgcaggccttcattaccaccgaccatgatatgaaccagattacggcgtttcatccaggcgcaatgatgcgttcgtacgaaaatcacgttcgtgatgtgccgggtgttaccttgggcctcgtaggtcctgatggacgcgagggcatgatccaaaatgccgaagaatttgctgctggtggcattccgttcatttttgacccaggtcaggcactgccgctgttcaacggccccgaactgcgcgagtttatcgaacaggcggactatgtggtggtcaacgattacgaaagcaatcttcttcaaacgcgtactggctggaacgagcaggacattgtttcacgcgtgcaggcgtatatcacgacgcaaggttcgaaaggagccctggtacatacaccggagaagacctacgatattccgccggcacacgaacgtctggtcgttgatccaactggttgcggcgacgcgtttcgcgccggcctgatctatggtattcagcataattatgattggttgaccattggccgcatgggaaacttaatgggtgcgctgaaagtggaacaccctggcacgcaaaatcagcgtttcgattttgccgaattcaacgaccagttcaaacaatattttggctacgcgctc

SEQ ID NO: 878 - protein, 321 aa, synthetic construct
  REGION 1..321: note = Variant of adenosine kinase
MHHHHHHGGSGMSALICGSLAYDTIMVFPDQFKNHILPDRVHRLNVSFLVPRMRREFGGCAGNIAYNLHLLGGAPIVMATVGQDFGPYREHFETLGIDLSRVKIIDDLSTPQAFITTDHDMNQITAFHPGAMMRSYENHVRDVPGVTLGLVGPDGREGMIQNAEEFAAGGIPFIFDPGQALPLFNGPELREFIEQADYVVVNDYESNLLQTRTGWNEQDIVSRVQAYITTQGSKGALVHTPEKTYDIPPAHERLVVDPTGCGDAFRAGLIYGIQHNYDWLTIGRMGNLMGALKVEHPGTQNQRFDFAEFNDQFKQYFGYAL

SEQ ID NO: 879 - DNA, 963 bp, synthetic construct
  misc_feature 1..963: note = Variant of adenosine kinase
  source 1..963: mol_type = other DNA
atgcaccatcatcaccatcacgggggctccggcatgagtgcactgatttgcggttctttcgcgtatgataccatcatggtgtttccggaccagttcaagaaccatattctgcccgatcgtgttcaccgcctcaatgtcagctttcttgtaccacgcatgcgtcgtgagtttggaggctgtgccggcaacattgcgtacaatctgcatctgttgggtggtgctccgatcgtaatggctacggtgggccaagatttcggtccgtatcgcgagcacttcgaaactctgggcattgacttatcccgcgtcaagatcatcgatgatctgagtacaccgcaggccttcattaccaccgaccatgatcacaaccagattacggcgtttcatccaggcgcaatgatgcgttcgtacgaaaatcacgttcgtgatgtgccgggtgttaccttgggcctcgtaggtcctgatggacgcgagggcatgatccaaaatgccgaagaatttgctgctggtggcattccgttcatttttgacccaggtcaggcactgccgctgttcaacggccccgaactgcgcgagtttatcgaacaggcggactatgtggtggtcaacgattacgaaagcaatcttcttcaaacgcgtactggctggaacgagcaggacattgtttcacgcgtgcaggcgtatatcacgacgcaaggttcgaaaggagccctggtacatacaccggagaagacctacgatattccgccggcacacgaacgtcgcgtcgttgatccaactggttgcggcgacgcgtttcgcgccggcctgatctatggtattcagcataattatgattggttgaccattggccgcatgggaaacttaatgggtgcgctgaaagtggcacaccctggcacgcaaaatcagcgtttcgattttgccgaattcaacgaccagttcaaacaatattttggctacgcgctc

SEQ ID NO: 880 - protein, 321 aa, synthetic construct
  REGION 1..321: note = Variant of adenosine kinase
MHHHHHHGGSGMSALICGSFAYDTIMVFPDQFKNHILPDRVHRLNVSFLVPRMRREFGGCAGNIAYNLHLLGGAPIVMATVGQDFGPYREHFETLGIDLSRVKIIDDLSTPQAFITTDHDHNQITAFHPGAMMRSYENHVRDVPGVTLGLVGPDGREGMIQNAEEFAAGGIPFIFDPGQALPLFNGPELREFIEQADYVVVNDYESNLLQTRTGWNEQDIVSRVQAYITTQGSKGALVHTPEKTYDIPPAHERRVVDPTGCGDAFRAGLIYGIQHNYDWLTIGRMGNLMGALKVAHPGTQNQRFDFAEFNDQFKQYFGYAL

SEQ ID NO: 881 - DNA, 963 bp, synthetic construct
  misc_feature 1..963: note = Variant of adenosine kinase
  source 1..963: mol_type = other DNA
atgcaccatcatcaccatcacgggggctccggcatgagtgcactgatttgcggttctttagcgtatgataccatcatggtgtttccggaccagttcaagaaccatattctgcccgatcgtgttcaccgcctcaatgtcagctttcttgtaccacgcatgcgtcgtgaatttggaggctgtgccggcaacattgcgtacaatctgcatctgttgggtggtgctccgatcgtaatggctacggtgggccaagatttcggtccgtatcgcgagcacttcgaaactctgggcattgacttatcccgcgtcaagatcatcgatgatctgagtacaccgcaggccttcattaccaccgaccatgatcataaccagattacggcgtttcatccaggcgcaatgatgcgttcgtacgaaaatcacgttcgtgatgtgccgggtgttaccttgggcctcgtaggtcctgatggacgcgagggcatgatccaaaatgccgaagaatttgctgctggtggcattccgttcatttttgacccaggtcaggcactgccgctgttcaacggccccgaactgcgcgagtttatcgaacaggcggactatgtggtggtcaacgattacgaaagcaatcttcttcaaacgcgtactggctggaacgagcaggacattgtttcacgcgtgcaggcgtatatcaccacgcaaggttcgaaaggagccctggtacatacaccggagaagacctacgatattccgccggcacacgaacgtcgtaagatggatccaactggttgcggcgacgcgtttcgcgccggcctgatctatggtattcagcataattatgattggttgaccattggccgcatgggaaacttaatgggtgcgctgaaagtggaacaccctggcacgcaaaatcagcgtttcgattttgccgaattcaacgaccagttcaaacaatattttggctacgcgctc

SEQ ID NO: 882 - protein, 321 aa, synthetic construct
  REGION 1..321: note = Variant of adenosine kinase
MHHHHHHGGSGMSALICGSLAYDTIMVFPDQFKNHILPDRVHRLNVSFLVPRMRREFGGCAGNIAYNLHLLGGAPIVMATVGQDFGPYREHFETLGIDLSRVKIIDDLSTPQAFITTDHDHNQITAFHPGAMMRSYENHVRDVPGVTLGLVGPDGREGMIQNAEEFAAGGIPFIFDPGQALPLFNGPELREFIEQADYVVVNDYESNLLQTRTGWNEQDIVSRVQAYITTQGSKGALVHTPEKTYDIPPAHERRKMDPTGCGDAFRAGLIYGIQHNYDWLTIGRMGNLMGALKVEHPGTQNQRFDFAEFNDQFKQYFGYAL

SEQ ID NO: 883 - DNA, 963 bp, synthetic construct
  misc_feature 1..963: note = Variant of adenosine kinase
  source 1..963: mol_type = other DNA
atgcaccatcatcaccatcacgggggctccggcatgagtgcactgatttgcggttctctggcgtatgataccatcatggtgtttccggaccagttcaagaaccatattctgcccgatcgtgttcaccgcctcaatgtcagctttcttgtaccacgcatgcgtcgtttttttggaggctgtgccggcaacattgcgtacaatctgcatctgttgggtggtgctccgatcgtaatggctacggtgggccaagatttcggtccgtatcgcgagcacttcgaaactctgggcattgacttatcccgcgtcaagatcatcgatgatctgagtacaccgcaggccttcattaccaccgaccatgatatgaaccagattacggcgtttcatccaggcgcaatgatgcgttcgtacgaaaatcacgttcgtgatgtgccgggtgttaccttgggcctcgtaggtcctgatggacgcgagggcatgatccaaaatgccgaagaatttgctgctggtggcattccgttcatttttgacccaggtcaggcactgccgctgttcaacggccccgaactgcgcgagtttatcgaacaggcggactatgtggtggtcaacgattacgaaagcaatcttcttcaaacgcgtactggctggaacgagcaggacattgtttcacgcgtgcaggcgtatatcgttacgcaaggttcgaaaggagccctggtacatacaccggagaagacctacgatattccgccggcacacgaacgtctggtcgttgatccaactggttgcggcgacgcgtttcgcgccggcctgatctatggtattcagcataattatgattggttgaccattggccgcatgggaaacttaatgggtgcgctgaaagtggaacaccctggcacgcaaaatcagcgtttcgattttgccgaattcaacgaccagttcaaacaatattttggctacgcgctc

SEQ ID NO: 884 - protein, 321 aa, synthetic construct
  REGION 1..321: note = Variant of adenosine kinase
MHHHHHHGGSGMSALICGSLAYDTIMVFPDQFKNHILPDRVHRLNVSFLVPRMRRFFGGCAGNIAYNLHLLGGAPIVMATVGQDFGPYREHFETLGIDLSRVKIIDDLSTPQAFITTDHDMNQITAFHPGAMMRSYENHVRDVPGVTLGLVGPDGREGMIQNAEEFAAGGIPFIFDPGQALPLFNGPELREFIEQADYVVVNDYESNLLQTRTGWNEQDIVSRVQAYIVTQGSKGALVHTPEKTYDIPPAHERLVVDPTGCGDAFRAGLIYGIQHNYDWLTIGRMGNLMGALKVEHPGTQNQRFDFAEFNDQFKQYFGYAL

SEQ ID NO: 885 - DNA, 963 bp, synthetic construct
  misc_feature 1..963: note = Variant of adenosine kinase
  source 1..963: mol_type = other DNA
atgcaccatcatcaccatcacgggggctccggcatgagtgcactgatttgcggttctttagcgtatgataccatcatggtgtttccggaccagttcaagaaccatattctgcccgatcgtgttcaccgcctcaatgtcagctttcttgtaccacgcatgcgtcgtgaatttggaggctgtgccggcaacattgcgtacaatctgcatctgttgggtggtgctccgatcgtaatggctacggtgggccaagatttcggtccgtatcgcgagcacttcgaaactctgggcattgacttatcccgcgtcaagatcatcgatgatctgagtacaccgcaggccttcattaccaccgacatggatcataaccagattacggcgtttcatggcggcgcaatgatgcgttcgtacgaaaatcacgttcgtgatgtgccgggtgttaccttgggcctcgtaggtcctgatggacgcgagggcatgatccaaaatgccgaagaatttgctgctggtggcattccgttcatttttgacccaggtcaggcactgccgctgttcaacggccccgaactgcgcgagtttatcgaacaggcggactatgtggtggtcaacgattacgaaagcaatcttcttcaaacgcgtactggctggaacgagcaggacattgtttcacgcgtgcaggcgtatatcaccacgcaaggttcggctggagccctggtacatacaccggagaagacctacgatattccgccggcacacgaacgtcgtgcgatggatccaactggttgcggcgacgcgtttcgcgccggcctgatctatggtattcagcataattatgattggttgaccattggccgcatgggaaacttaatgggtgcgctgaaagtggaacaccctggcacgcaaaatcagcgtttcgattttgccgaattcaacgaccagttcaaacaatattttggctacgcgctc

SEQ ID NO: 886 - protein, 321 aa, synthetic construct
  REGION 1..321: note = Variant of adenosine kinase
MHHHHHHGGSGMSALICGSLAYDTIMVFPDQFKNHILPDRVHRLNVSFLVPRMRREFGGCAGNIAYNLHLLGGAPIVMATVGQDFGPYREHFETLGIDLSRVKIIDDLSTPQAFITTDMDHNQITAFHGGAMMRSYENHVRDVPGVTLGLVGPDGREGMIQNAEEFAAGGIPFIFDPGQALPLFNGPELREFIEQADYVVVNDYESNLLQTRTGWNEQDIVSRVQAYITTQGSAGALVHTPEKTYDIPPAHERRAMDPTGCGDAFRAGLIYGIQHNYDWLTIGRMGNLMGALKVEHPGTQNQRFDFAEFNDQFKQYFGYAL

SEQ ID NO: 887 - DNA, 963 bp, synthetic construct
  misc_feature 1..963: note = Variant of adenosine kinase
  source 1..963: mol_type = other DNA
atgcaccatcatcaccatcacgggggctccggcatgagtgcactgatttgcggttctttagcgtatgataccatcatggtgtttccggaccagttcaagaaccatattctgcccgatcgtgttcaccgcctcaatgtcagctttcttgtaccacgcatgcgtcgtgaatttggaggctgtgccggcaacattgcgtacaatctgcatctgttgggtggtgctccgatcgtaatggctacggtgggccaagatttcggtccgtatcgcgagcacttcgaaactctgggcattgacttatcccgcgtcaagatcatcgatgatctgagtacaccgcaggccttcattaccaccgaccgcgatcataaccagattacggcgtttcatccaggcgcaatgatgcgttcgtacgaaaatcacgttcgtgatgtgccgggtgttaccttgggcctcgtaggtcctgatggacgcgagggcatgatccaaaatgccgaagaatttgctgctggtggcattccgttcatttttgacccaggtcaggcagtgccgctgttcaacggccccgaactgcgcgagtttatcgaacaggcggactatgtggtggtcaacgattacgaaagcaatcttcttcaaacgcgtactggctggaacgagcaggacattgtttcacgcgtgcaggcgtatatcaccacgcaaggttcgaaaggagccctggtacatacaccggagaagacctacgatattccgccggctcacgaacgtcgtgtcgttgatccaactggttgcggcgacgcgtttcgcgccggcctgatctatggtattcagcataattatgattggttgaccattggccgcatgggaaacttaatgggtgcgctgaaagtggaacaccctggcacgcaaaatcagcgtttcgattttgccgaattcaacgaccagttcaaacaatattttggctacgcgctc

SEQ ID NO: 888 - protein, 321 aa, synthetic construct
  REGION 1..321: note = Variant of adenosine kinase
MHHHHHHGGSGMSALICGSLAYDTIMVFPDQFKNHILPDRVHRLNVSFLVPRMRREFGGCAGNIAYNLHLLGGAPIVMATVGQDFGPYREHFETLGIDLSRVKIIDDLSTPQAFITTDRDHNQITAFHPGAMMRSYENHVRDVPGVTLGLVGPDGREGMIQNAEEFAAGGIPFIFDPGQAVPLFNGPELREFIEQADYVVVNDYESNLLQTRTGWNEQDIVSRVQAYITTQGSKGALVHTPEKTYDIPPAHERRVVDPTGCGDAFRAGLIYGIQHNYDWLTIGRMGNLMGALKVEHPGTQNQRFDFAEFNDQFKQYFGYAL

SEQ ID NO: 889 - DNA, 963 bp, synthetic construct
  misc_feature 1..963: note = Variant of adenosine kinase
  source 1..963: mol_type = other DNA
atgcaccatcatcaccatcacgggggctccggcatgagtgcactgatttgcggttctttagcgtatgataccatcatggtgtttccggaccagttcaagaaccatattctgcccgatcgtgttcaccgcctcaatgtcagctttcttgtaccacgcatgcgtcgtgggtttggaggctgtgccggcaacattgcgtacaatctgcatctgttgggtggtgctccgatcgtaatggctacggtgggccaagatttcggtccgtatcgcgagcacttcgaaactctgggcattgacttatcccgcgtcaagatcatcgatgatctgagtacaccgcaggccttcattaccaccgacatggatcacaaccagattacggcgtttcatggcggcgcaatgatgcgttcgtacgaaaatcacgttcgtgatgtgccgggtgttaccttgggcctcgtaggtcctgatggacgcgagggcatgatccaaaatgccgaagaatttgctgctggtggcattccgttcatttttgacccaggtcaggcactgccgctgttcaacggccccgaactgcgcgagtttatcgaacaggcggactatgtggtggtcaacgattacgaaagcaatcttcttcaaacgcgtactggctggaacgagcaggacattgtttcacgcgtgcaggcgtatatcgttacgcaaggttcggctggagccctggtacatacaccggagaagacctacgatattccgccggctcacacccgtcgtgtcgttgatccaactggttgcggcgacgcgtttcgcgccggcctgatctatggtattcagcataattatgattggttgaccattggccgcatgggaaacttaatgggtgcgctgaaagtggaacaccctggcacccaaaatcagcgtttcgattttgccgaattcaacgaccagttcaaacaatattttggctacgcgctc

SEQ ID NO: 890 - protein, 321 aa, synthetic construct
  REGION 1..321: note = Variant of adenosine kinase
MHHHHHHGGSGMSALICGSLAYDTIMVFPDQFKNHILPDRVHRLNVSFLVPRMRRGFGGCAGNIAYNLHLLGGAPIVMATVGQDFGPYREHFETLGIDLSRVKIIDDLSTPQAFITTDMDHNQITAFHGGAMMRSYENHVRDVPGVTLGLVGPDGREGMIQNAEEFAAGGIPFIFDPGQALPLFNGPELREFIEQADYVVVNDYESNLLQTRTGWNEQDIVSRVQAYIVTQGSAGALVHTPEKTYDIPPAHTRRVVDPTGCGDAFRAGLIYGIQHNYDWLTIGRMGNLMGALKVEHPGTQNQRFDFAEFNDQFKQYFGYAL

SEQ ID NO: 891 - DNA, 963 bp, synthetic construct
  misc_feature 1..963: note = Variant of adenosine kinase
  source 1..963: mol_type = other DNA
atgcaccatcatcaccatcacgggggctccggcatgagtgcactgatttgcggttctttagggtatgataccatcatggtgtttccggaccagttcaagaaccatattctgcccgatcgtgttcaccgcctcaatgtcagctttcttgtaccacgcatgcgtcgtgggtttggaggctgtgccggcaacattgcgtacaatctgcatctgttgggtggtgctccgatcgtaatggctacggtgggccaagatttcggtccgtatcgcgagcacttcgaaactctgggcattgacttatcccgcgtcaagatcatcgatgatctgagtacaccgcaggccttcattaccaccgacatggatcacaaccagattacggcgtttcatggcggcgcaatgatgcgttcgtacgaaaatcacgttcgtgatgtgccgggtgttaccttgggcctcgtaggtcctgatggacgcgagggcatgatccaaaatgccgaagaatttgctgctggtggcattccgttcatttttgacccaggtcaggcactgccgctgttcaacggccccgaactgcgcgagtttatcgaacaggcggactatgtggtggtcaacgattacgaaagcaatcttcttcaaacgcgtactggctggaacgagcaggacattgtttcacgcgtgcaggcgtatatcaccacgcaaggttcggctggagccctggtacatacaccggagaagacctacgatattccgccggctcacacccgtcgtgtcgttgatccaactggttgcggcgacgcgtttcgcgccggcctgatctatggtattcagcataattatgattggttgaccattggccgcatgggaaacttaatgggtgcgctgaaagtggaacaccctggcacccaaaatcagcgtttcgattttgccgaattcaacgaccagttcaaacaatattttggctacgcgctc

SEQ ID NO: 892 - protein, 321 aa, synthetic construct
  REGION 1..321: note = Variant of adenosine kinase
MHHHHHHGGSGMSALICGSLGYDTIMVFPDQFKNHILPDRVHRLNVSFLVPRMRRGFGGCAGNIAYNLHLLGGAPIVMATVGQDFGPYREHFETLGIDLSRVKIIDDLSTPQAFITTDMDHNQITAFHGGAMMRSYENHVRDVPGVTLGLVGPDGREGMIQNAEEFAAGGIPFIFDPGQALPLFNGPELREFIEQADYVVVNDYESNLLQTRTGWNEQDIVSRVQAYITTQGSAGALVHTPEKTYDIPPAHTRRVVDPTGCGDAFRAGLIYGIQHNYDWLTIGRMGNLMGALKVEHPGTQNQRFDFAEFNDQFKQYFGYAL

SEQ ID NO: 893 - DNA, 963 bp, synthetic construct
  misc_feature 1..963: note = Variant of adenosine kinase
  source 1..963: mol_type = other DNA
atgcaccatcatcaccatcacgggggctccggcatgagtgcactgatttgcggttctttagcgtatgataccatcatggtgtttccggaccagttcaagaaccatattctgcccgatcgtgttcaccgcctcaatgtcagctttcttgtaccacgcatgcgtcgtgaatttggaggctgtgccggcaacattgcgtacaatctgcatctgttgggtggtgctccgatcgtaatggctacggtgggccaagatttcggtccgtatcgcgagcacttcgaaactctgggcattgacttatcccgcgtcaagatcatcgatgatctgagtacaccgcaggcgttcattaccaccgacatggatcataaccagattacggcgtttcatggcggcgcaatgatgcgttcgtacgaaaatcacgttcgtgatgtgccgggtgttaccttgggcctcgtaggtcctgatggacgcgagggcatgatccaaaatgccgaagaatttgctgctggtggcattccgttcatttttgacccaggtcaggcagtgccgctgttcaacggccccgaactgcgcgagtttatcgaacaggcggactatgtggtggtcaacgattacgaaagcaatcttcttcaaacgcgtactggctggaacgagcaggacattgtttcacgcgtgcaggcgtatatcaccacgcaaggttcggctggagccctggtacatacaccggagaagacctacgatattccgccggctcacacccgtcgtgtcgttgatccaactggttgcggcgacgcgtttcgcgccggcctgatctatggtattcagcataattatgattggttgaccattggccgcatgggaaacttaatgggtgcgctgaaagtggaacaccctggcacccaaaatcagcgtttcgattttgccgaattcaacgaccagttcaaacaatattttggctacgcgctc

SEQ ID NO: 894 - protein, 321 aa, synthetic construct
  REGION 1..321: note = Variant of adenosine kinase
MHHHHHHGGSGMSALICGSLAYDTIMVFPDQFKNHILPDRVHRLNVSFLVPRMRREFGGCAGNIAYNLHLLGGAPIVMATVGQDFGPYREHFETLGIDLSRVKIIDDLSTPQAFITTDMDHNQITAFHGGAMMRSYENHVRDVPGVTLGLVGPDGREGMIQNAEEFAAGGIPFIFDPGQAVPLFNGPELREFIEQADYVVVNDYESNLLQTRTGWNEQDIVSRVQAYITTQGSAGALVHTPEKTYDIPPAHTRRVVDPTGCGDAFRAGLIYGIQHNYDWLTIGRMGNLMGALKVEHPGTQNQRFDFAEFNDQFKQYFGYAL

SEQ ID NO: 895 - DNA, 963 bp, synthetic construct
  misc_feature 1..963: note = Variant of adenosine kinase
  source 1..963: mol_type = other DNA
atgcaccatcatcaccatcacgggggctccggcatgagtgcactgatttgcggttctttagcgtatgataccatcatggtgtttccggaccagttcaagaaccatattctgcccgatcgtgttcaccgcctcaatgtcagctttcttgtaccacgcatgcgtcgtgaatttggaggctgtgccggcaacattgcgtacaatctgcatctgttgggtggtgctccgatcgtaatggctacggtgggccaagatttcggtccgtatcgcgagcacttcgaaactctgggcattgacttatcccgcgtcaagatcatcgatgatctgagtacaccgcaggccttcattaccaccgacatggatcataaccagattacggcgtttcacggcggcgcaatgatgcgttcgtacgaaaatcacgttcgtgatgtgccgggtgttaccttgggcctcgtaggtcctgatggacgcgagggcatgatccaaaatgccgaagaatttgctgctggtggcattccgttcatttttgacccaggtcaggcagtgccgctgttcaacggccccgaactgcgcgagtttatcgaacaggcggactatgtggtggtcaacgattacgaaagcaatcttcttcaagcccgtactggctggaacgagcaggacattgtttcacgcgtgcaggcgtatatcaccacgcaaggttcggctggagccctggtacatacaccggagaagacctacgatattccgccggctaaaacccgtcgtgtcgttgatccaactggttgcggcgacgcgtttcgcgccggcctgatctatggtattcagcataattatgattggttgaccattggccgcatgggaaacttaatgggtgcgctgaaagtggaacaccctggcacccaaaatcagcgtttcgattttgccgaattcaacgaccagttcaaacaatattttggctacgcgctc

SEQ ID NO: 896 - protein, 321 aa, synthetic construct
  REGION 1..321: note = Variant of adenosine kinase
MHHHHHHGGSGMSALICGSLAYDTIMVFPDQFKNHILPDRVHRLNVSFLVPRMRREFGGCAGNIAYNLHLLGGAPIVMATVGQDFGPYREHFETLGIDLSRVKIIDDLSTPQAFITTDMDHNQITAFHGGAMMRSYENHVRDVPGVTLGLVGPDGREGMIQNAEEFAAGGIPFIFDPGQAVPLFNGPELREFIEQADYVVVNDYESNLLQARTGWNEQDIVSRVQAYITTQGSAGALVHTPEKTYDIPPAKTRRVVDPTGCGDAFRAGLIYGIQHNYDWLTIGRMGNLMGALKVEHPGTQNQRFDFAEFNDQFKQYFGYAL

SEQ ID NO: 897 - DNA, 963 bp, synthetic construct
  misc_feature 1..963: note = Variant of adenosine kinase
  source 1..963: mol_type = other DNA
atgcaccatcatcaccatcacgggggctccggcatgagtgcactgatttgcggttctttagcgtatgataccatcatggtgtttccggaccagttcaagaaccatattctgcccgatcgtgttcaccgcctcaatgtcagctttcttgtaccacgcatgcgtcgtgaatttggaggctgtgccggcaacattgcgtacaatctgcatctgttgggtggtgctccgatcgtaatggctacggtgggccaagatttcggtccgtatcgcgagcacttcgaaactctgggcattgacttatcccgcgtcaagatcatcgatgatctgagtacaccgcaggccttcattaccaccgacatggatcataaccagattacggcgtttcacggcggcgcaatgatgcgttcgtacgaaaatcacgttcgtgatgtgccgggtgttaccttgggcctcgtaggtcctgatggacgcgagggcatgatccaaaatgccgaagaatttgctgctggtggcattccgttcatttttgacccaggtcaggcagtgccgctgttcaacggccccgaactgcgcgagtttatcgaacaggcggactatgtggtggtcaacgattacgaaagcaatcttcttcaagcccgtactggctggaacgagcaggacattgtttcacgcgtgcaggcgtatatcaccacgcaaggttcggctggagccctggtacatacaccggagaagacctacgatattccgccggctcatacccgtcgtgtcgttgatccaactggttgcggcgacgcgtttcgcgccggcctgatctatggtattcagcataattatgattggttgaccattggccgcatgggaaacttaatgggtgcgctgaaagtggaacaccctggcacccaaaatcagcgtttcgattttgccgaattcaacgaccagttcaaacaatattttggctacgcgctc

SEQ ID NO: 898 - protein, 321 aa, synthetic construct
  REGION 1..321: note = Variant of adenosine kinase
MHHHHHHGGSGMSALICGSLAYDTIMVFPDQFKNHILPDRVHRLNVSFLVPRMRREFGGCAGNIAYNLHLLGGAPIVMATVGQDFGPYREHFETLGIDLSRVKIIDDLSTPQAFITTDMDHNQITAFHGGAMMRSYENHVRDVPGVTLGLVGPDGREGMIQNAEEFAAGGIPFIFDPGQAVPLFNGPELREFIEQADYVVVNDYESNLLQARTGWNEQDIVSRVQAYITTQGSAGALVHTPEKTYDIPPAHTRRVVDPTGCGDAFRAGLIYGIQHNYDWLTIGRMGNLMGALKVEHPGTQNQRFDFAEFNDQFKQYFGYAL

SEQ ID NO: 899 - DNA, 963 bp, synthetic construct
  misc_feature 1..963: note = Variant of adenosine kinase
  source 1..963: mol_type = other DNA
atgcaccatcatcaccatcacgggggctccggcatgagtgcactgatttgcggttctttagggtatgataccatcatggtgtttccggaccagttcaagaaccatattctgcccgatcgtgttcaccgcctcaatgtcagctttcttgtaccacgcatgcgtcgtgagtttggaggctgtgccggcaacattgcgtacaatctgcatctgttgggtggtgctccgatcgtaatggctacggtgggccaagatttcggtccgtatcgcgagcacttcgaaactctgggcattgacttatcccgcgtcaagatcatcgatgatctgagtacaccgcaggccttcattaccaccgacatggatctgaaccagattacggcgtttcatggcggcgcaatgatgcgttcgtacgaaaatcacgttcgtgatgtgccgggtgttaccttgggcctcgtaggtcctgatggacgcgagggcatgatccaaaatgccgaagaatttgctgctggtggcattccgttcatttttgacccaggtcaggcactgccgctgttcaacggccccgaactgcgcgagtttatcgaacaggcggactatgtggtggtcaacgattacgaaagcaatcttcttcaaacgcgtactggctggaacgagcaggacattgtttcacgcgtgcaggcgtatatcacgacgcaaggttcggctggagccctggtacatacaccggagaagacctacgatattccgccggctcacacccgtcgtgtcgttgatccaactggttgcggcgacgcgtttcgcgccggcctgatctatggtattcagcataattatgattggttgaccattggccgcatgggaaacttaatgggtgcgctgaaagtggaacaccctggcagccaaaatcagcgtttcgattttgccgaattcaacgaccagttcaaacaatattttggctacgcgctc

SEQ ID NO: 900 - protein, 321 aa, synthetic construct
  REGION 1..321: note = Variant of adenosine kinase
MHHHHHHGGSGMSALICGSLGYDTIMVFPDQFKNHILPDRVHRLNVSFLVPRMRREFGGCAGNIAYNLHLLGGAPIVMATVGQDFGPYREHFETLGIDLSRVKIIDDLSTPQAFITTDMDLNQITAFHGGAMMRSYENHVRDVPGVTLGLVGPDGREGMIQNAEEFAAGGIPFIFDPGQALPLFNGPELREFIEQADYVVVNDYESNLLQTRTGWNEQDIVSRVQAYITTQGSAGALVHTPEKTYDIPPAHTRRVVDPTGCGDAFRAGLIYGIQHNYDWLTIGRMGNLMGALKVEHPGSQNQRFDFAEFNDQFKQYFGYAL

SEQ ID NO: 901 - DNA, 963 bp, synthetic construct
  misc_feature 1..963: note = Variant of adenosine kinase
  source 1..963: mol_type = other DNA
atgcaccatcatcaccatcacgggggctccggcatgagtgcactgatttgcggttctttagcgtatgataccatcatggtgtttccggaccagttcaagaaccatattctgcccgatcgtgttcaccgcctcaatgtcagctttcttgtaccacgcatgcgtcgtgaatttggaggctgtgccggcaacattgcgtacaatctgcatctgttgggtggtgctccgatcgtaatggctacggtgggccaagatttcggtccgtatcgcgagcacttcgaaactctgggcattgacttatcccgcgtcaagatcatcgatgatctgagtacaccgcaggccttcattaccaccgacatggatcacaaccagattacggcgtttcatggcggcgcaatgatgcgttcgtacgaaaatcacgttcgtgatgtgccgggtgttaccttgggcctcgtaggtcctgatggacgcgagggcatgatccaaaatgccgaagaatttgctgctggtggcattccgttcatttttgacccaggtcaggcactgccgctgttcaacggccccgaactgcgcgagtttatcgaacaggcggactatgtggtggtcaacgattacgaaagcaatcttcttcaaacgcgtactggctggaacgagcaggacattgtttcacgcgtgcaggcgtatatcgttacgcaaggttcggctggagccctggtacatacaccggagaagacctacgatattccgccggctcacacccgtcgtgtagttgatccaactggttgcggcgacgcgtttcgcgccggcctgatctatggtattcagcataattatgattggttgaccattggccgcatgggaaacttaatgggtgcgctgaaagtggaacaccctggcacccaaaatcagcgtttcgattttgccgaattcaacgaccagttcaaacaatattttggctacgcgctc

SEQ ID NO: 902 - protein, 321 aa, synthetic construct
  REGION 1..321: note = Variant of adenosine kinase
MHHHHHHGGSGMSALICGSLAYDTIMVFPDQFKNHILPDRVHRLNVSFLVPRMRREFGGCAGNIAYNLHLLGGAPIVMATVGQDFGPYREHFETLGIDLSRVKIIDDLSTPQAFITTDMDHNQITAFHGGAMMRSYENHVRDVPGVTLGLVGPDGREGMIQNAEEFAAGGIPFIFDPGQALPLFNGPELREFIEQADYVVVNDYESNLLQTRTGWNEQDIVSRVQAYIVTQGSAGALVHTPEKTYDIPPAHTRRVVDPTGCGDAFRAGLIYGIQHNYDWLTIGRMGNLMGALKVEHPGTQNQRFDFAEFNDQFKQYFGYAL

SEQ ID NO: 903 - DNA, 963 bp, synthetic construct
  misc_feature 1..963: note = Variant of adenosine kinase
  source 1..963: mol_type = other DNA
atgcaccatcatcaccatcacgggggctccggcatgagtgcactgatttgcggttctttagcgtatgataccatcatggtgtttccggaccagttcaagaaccatattctgcccgatcgtgttcaccgcctcaatgtcagctttcttgtaccacgcatgcgtcgtgggtttggaggctgtgccggcaacattgcgtacaatctgcatctgttgggtggtgctccgatcgtaatggctacggtgggccaagatttcggtccgtatcgcgagcacttcgaaactctgggcattgacttatcccgcgtcaagatcatcgatgatctgagtacaccgcaggccttcattaccaccgacatggatcataaccagattacggcgtttcatggcggcgcaatgatgcgttcgtacgaaaatcacgttcgtgatgtgccgggtgttaccttgggcctcgtaggtcctgatggacgcgagggcatgatccaaaatgccgaagaatttgctgctggtggcattccgttcatttttgacccaggtcaggcactgccgctgttcaacggccccgaactgcgcgagtttatcgaacaggcggactatgtggtggtcaacgattacgaaagcaatcttcttcaaacgcgtactggctggaacgagcaggacattgtttcacgcgtgcaggcgtatatcaccacgcaaggttcggctggagccctggtacatacaccggagaagacctacgatattccgccggctcacacccgtcgtgtcgttgatccaactggttgcggcgacgcgtttcgcgccggcctgatctatggtattcagcataattatgattggttgaccattggccgcatgggaaacttaatgggtgcgctgaaagtggaacaccctggcacccaaaatcagcgtttcgattttgccgaattcaacgaccagttcaaacaatattttggctacgcgctc

SEQ ID NO: 904 - protein, 321 aa, synthetic construct
  REGION 1..321: note = Variant of adenosine kinase
MHHHHHHGGSGMSALICGSLAYDTIMVFPDQFKNHILPDRVHRLNVSFLVPRMRRGFGGCAGNIAYNLHLLGGAPIVMATVGQDFGPYREHFETLGIDLSRVKIIDDLSTPQAFITTDMDHNQITAFHGGAMMRSYENHVRDVPGVTLGLVGPDGREGMIQNAEEFAAGGIPFIFDPGQALPLFNGPELREFIEQADYVVVNDYESNLLQTRTGWNEQDIVSRVQAYITTQGSAGALVHTPEKTYDIPPAHTRRVVDPTGCGDAFRAGLIYGIQHNYDWLTIGRMGNLMGALKVEHPGTQNQRFDFAEFNDQFKQYFGYAL

SEQ ID NO: 905 - DNA, 963 bp, synthetic construct
  misc_feature 1..963: note = Variant of adenosine kinase
  source 1..963: mol_type = other DNA
atgcaccatcatcaccatcacgggggctccggcatgagtgcactgatttgcggttctttagcgtatgataccatcatggtgtttccggaccagttcaagaaccatattctgcccgatcgtgttcaccgcctcaatgtcagctttcttgtaccacgcatgcgtcgtgggtttggaggctgtgccggcaacattgcgtacaatctgcatctgttgggtggtgctccgatcgtaatggctacggtgggccaagatttcggtccgtatcgcgagcacttcgaaactctgggcattgacttatcccgcgtcaagatcatcgatgatctgagtacaccgcaggccttcattaccaccgacatggatcataaccagattacggcgtttcatggcggcgcaatgatgcgttcgtacgaaaatcacgttcgtgatgtgccgggtgttaccttgggcctcgtaggtcctgatggacgcgagggcatgatccaaaatgccgaagaatttgctgctgatggcattccgttcatttttgacccaggtcaggcactgccgctgttcaacggccccgaactgcgcgagtttatcgaacaggcggactatgtggtggtcaacgattacgaaagcaatcttcttcaaacgcgtactggctggaacgagcaggacattgtttcacgcgtgcaggcgtatatcacgacgcaaggttcggctggagccctggtacatacaccggagaagacctacgatattccgccggctcacacccgtcgtgtcgttgatccaactggttgcggcgacgcgtttcgcgccggcctgatctatggtattcagcataattatgattggttgaccattggccgcatgggaaacttaatgggtgcgctgaaagtggaacaccctggcacccaaaatcagcgtttcgattttgccgaattcaacgaccagttcaaacaatattttggctacgcgctc

SEQ ID NO: 906 - protein, 321 aa, synthetic construct
  REGION 1..321: note = Variant of adenosine kinase
MHHHHHHGGSGMSALICGSLAYDTIMVFPDQFKNHILPDRVHRLNVSFLVPRMRRGFGGCAGNIAYNLHLLGGAPIVMATVGQDFGPYREHFETLGIDLSRVKIIDDLSTPQAFITTDMDHNQITAFHGGAMMRSYENHVRDVPGVTLGLVGPDGREGMIQNAEEFAADGIPFIFDPGQALPLFNGPELREFIEQADYVVVNDYESNLLQTRTGWNEQDIVSRVQAYITTQGSAGALVHTPEKTYDIPPAHTRRVVDPTGCGDAFRAGLIYGIQHNYDWLTIGRMGNLMGALKVEHPGTQNQRFDFAEFNDQFKQYFGYAL

SEQ ID NO: 907 - DNA, 963 bp, synthetic construct
  misc_feature 1..963: note = Variant of adenosine kinase
  source 1..963: mol_type = other DNA
atgcaccatcatcaccatcacgggggctccggcatgagtgcactgatttgcggttctttagcgtatgataccatcatggtgtttccggaccagttcaagaaccatattctgcccgatcgtgttcaccgcctcaatgtcagctttcttgtaccacgcatgcgtcgtgaatttggaggctgtgccggcaacattgcgtacaatctgcatctgttgggtggtgctccgatcgtaatggctacggtgggccaagatttcggtccgtatcgcgagcacttcgaaactctgggcattgacttatcccgcgtcaagatcatcgatgatctgagtacaccgcaggccttcattaccaccgacatggatcataaccagattacggcgtttcatggcggcgcaatgatgcgttcgtacgaaaatcacgttcgtgatgtgccgggtgttaccttgggcctcgtaggtcctgatggacgcgagggcatgatccaaaatgccgaagaatttgctgctggtggcattccgttcatttttgacccaggtcaggcactgccgctgttcaacggccccgaactgcgcgagtttatcgaacaggcggactatgtggtggtcaacgattacgaaagcaatcttcttcaaacgcgtactggctggaacgagcaggacattgtttcacgcgtgcaggcgtatatcaccacgcaaggttcggctggagccctggtacatacaccggagaagacctacgatattccgccggctcacacccgtcgtgtcgttgatccaactggttgcggcgacgcgtttcgcgccggcctgatctatggtattcagcataattatgattggttgaccattggccgcatgggaaacttaatgggtgcgctgaaagtggaacaccctggcacccaaaatcagcgtttcgattttgccgaattcaaccagcagttcaaacaatattttggctacgcgctc

SEQ ID NO: 908 - protein, 321 aa, synthetic construct
  REGION 1..321: note = Variant of adenosine kinase
MHHHHHHGGSGMSALICGSLAYDTIMVFPDQFKNHILPDRVHRLNVSFLVPRMRREFGGCAGNIAYNLHLLGGAPIVMATVGQDFGPYREHFETLGIDLSRVKIIDDLSTPQAFITTDMDHNQITAFHGGAMMRSYENHVRDVPGVTLGLVGPDGREGMIQNAEEFAAGGIPFIFDPGQALPLFNGPELREFIEQADYVVVNDYESNLLQTRTGWNEQDIVSRVQAYITTQGSAGALVHTPEKTYDIPPAHTRRVVDPTGCGDAFRAGLIYGIQHNYDWLTIGRMGNLMGALKVEHPGTQNQRFDFAEFNQQFKQYFGYAL

SEQ ID NO: 909 - DNA, 963 bp, synthetic construct
  misc_feature 1..963: note = Variant of adenosine kinase
  source 1..963: mol_type = other DNA
atgcaccatcatcaccatcacgggggctccggcatgagtgcactgatttgcggttctttagcgtatgataccatcatggtgtttccggaccagttcaagaaccatattctgcccgatcgtgttcaccgcctcaatgtcagctttcttgtaccagatatgcgtcgtgaatttggaggctgtgccggcaacattgcgtacaatctgcatctgttgggtggtgctccgatcgtaatggctacggtgggccaagatttcggtccgtatcgcgagcacttcgaaactctgggcattgacttatcccgcgtcaagatcatcgatgatctgagtacaccgcaggccttcattaccaccgacatggatcataaccagattacggcgtttcatggcggcgcaatgatgcgttcgtacgaaaatcacgttcgtgatgtgccgggtgttaccttgggcctcgtaggtcctgatggacgcgagggcatgatccaaaatgccgaagaatttgctgctggtggcattccgttcatttttgacccaggtcaggcactgccgctgttcaacggccccgaactgcgcgagtttatcgaacaggcggactatgtggtggtcaacgattacgaaagcaatcttcttcaaacgcgtactggctggaacgagcaggacattgtttcacgcgtgcaggcgtatatcaccacgcaaggttcggctggagccctggtacatacaccggagaagacctacgatattccgccggctcacacccgtcgtgtcgttgatccaactggttgcggcgacgcgtttcgcgccggcctgatctatggtattcagcataattatgattggttgaccattggccgcatgggaaacttaatgggtgcgctgaaagtggaacaccctggcacccaaaatcagcgtttcgattttgccgaattcaacgaccagttcaaacaatattttggctacgcgctc

SEQ ID NO: 910 - protein, 321 aa, synthetic construct
  REGION 1..321: note = Variant of adenosine kinase
MHHHHHHGGSGMSALICGSLAYDTIMVFPDQFKNHILPDRVHRLNVSFLVPDMRREFGGCAGNIAYNLHLLGGAPIVMATVGQDFGPYREHFETLGIDLSRVKIIDDLSTPQAFITTDMDHNQITAFHGGAMMRSYENHVRDVPGVTLGLVGPDGREGMIQNAEEFAAGGIPFIFDPGQALPLFNGPELREFIEQADYVVVNDYESNLLQTRTGWNEQDIVSRVQAYITTQGSAGALVHTPEKTYDIPPAHTRRVVDPTGCGDAFRAGLIYGIQHNYDWLTIGRMGNLMGALKVEHPGTQNQRFDFAEFNDQFKQYFGYAL

SEQ ID NO: 911 - DNA, 963 bp, synthetic construct
  misc_feature 1..963: note = Variant of adenosine kinase
  source 1..963: mol_type = other DNA
atgcaccatcatcaccatcacgggggctccggcatgagtgcactgatttgcggttctttagcgtatgataccatcatggtgtttccggaccagttcaagaaccatattctgcccgatcgtgttcaccgcctcaatgtcagctttcttgtaccacgcatgcgtcgtgaatttggaggctgtgccggcaacattgcgtacaatctgcatctgttgggtggtgctccgatcgtaatggctacggtgggccaagatttcggtccgtatcgcgagcacttcgaaactctgggcattgacttatcccgcgtcaagatcatcgatgatctgagtacaccgcaggccttcattaccaccgacatggatcataaccagattacggcgtttcatggcggcgcaatgatgcgttcgtacgaaaatcacgttcgtgatgtgccgggtgttaccttgggcctcgtaggtcctgatggacgcgagggcatgatccaaaatgccgaagaatttgctgctggtcggattccgttcatttttgacccaggtcaggcactgccgctgttcaacggccccgaactgcgcgagtttatcgaacaggcggactatgtggtggtcaacgattacgaaagcaatcttcttcaaacgcgtactggctggaacgagcaggacattgtttcacgcgtgcaggcgtatatcaccacgcaaggttcggctggagccctggtacatacaccggagaagacctacgatattccgccggctcacacccgtcgtgtcgttgatccaactggttgcggcgacgcgtttcgcgccggcctgatctatggtattcagcataattatgattggttgaccattggccgcatgggaaacttaatgggtgcgctgaaagtggaacaccctggcacccaaaatcagcgtttcgattttgccgaattcaacgaccagttcaaacaatattttggctacgcgctc

SEQ ID NO: 912 - protein, 321 aa, synthetic construct
  REGION 1..321: note = Variant of adenosine kinase
MHHHHHHGGSGMSALICGSLAYDTIMVFPDQFKNHILPDRVHRLNVSFLVPRMRREFGGCAGNIAYNLHLLGGAPIVMATVGQDFGPYREHFETLGIDLSRVKIIDDLSTPQAFITTDMDHNQITAFHGGAMMRSYENHVRDVPGVTLGLVGPDGREGMIQNAEEFAAGRIPFIFDPGQALPLFNGPELREFIEQADYVVVNDYESNLLQTRTGWNEQDIVSRVQAYITTQGSAGALVHTPEKTYDIPPAHTRRVVDPTGCGDAFRAGLIYGIQHNYDWLTIGRMGNLMGALKVEHPGTQNQRFDFAEFNDQFKQYFGYAL

SEQ ID NO: 913 - DNA, 963 bp, synthetic construct
  misc_feature 1..963: note = Variant of adenosine kinase
  source 1..963: mol_type = other DNA
atgcaccatcatcaccatcacgggggctccggcatgagtgcactgatttgcggttctttagcgtatgataccatcatggtgtttccggacctgttcaagaaccatattctgcccgatcgtgttcaccgcctcaatgtcagctttcttgtaccacgcatgcgtcgtgaatttggaggctgtgccggcaacattgcgtacaatctgcatctgttgggtggtgctccgatcgtaatggctacggtgggccaagatttcggtccgtatcgcgagcacttcgaaactctgggcattgacttatcccgcgtcaagatcatcgatgatctgagtacaccgcaggcgttcattaccaccgacatggatcataaccagattacggcgtttcacggcggcgcaatgatgcgttcgtacgaaaatcacgttcgtgatgtgccgggtgttaccttgggcctcgtaggtcctgatggacgcgagggcatgatccaaaatgccgaagaatttgctgctggtggcattccgttcatttttgacccaggtcaggcagtgccgctgttcaacggccccgaactgcgcgagtttatcgaacaggcggactatgtggtggtcaacgattacgaaagcaatcttcttcaagcccgtactggctggaacgagcaggacattgtttcacgcgtgcaggcgtatatcaccacgcaaggttcggctggagccctggtacatacaccggagaagacctacgatattccgccggctcacacccgtcgtgtcgttgatccaactggttgcggcgacgcgtttcgcgccggcctgatctatggtattcagcataattatgattggttgaccattggccgcatgggaaacttaatgggtgcgctgaaagtggaacaccctggcacccaaaatcagcgtttcgattttgccgaattcaacgaccagttcaaacaatattttggctacgcgctc

SEQ ID NO: 914 - protein, 321 aa, synthetic construct
  REGION 1..321: note = Variant of adenosine kinase
MHHHHHHGGSGMSALICGSLAYDTIMVFPDLFKNHILPDRVHRLNVSFLVPRMRREFGGCAGNIAYNLHLLGGAPIVMATVGQDFGPYREHFETLGIDLSRVKIIDDLSTPQAFITTDMDHNQITAFHGGAMMRSYENHVRDVPGVTLGLVGPDGREGMIQNAEEFAAGGIPFIFDPGQAVPLFNGPELREFIEQADYVVVNDYESNLLQARTGWNEQDIVSRVQAYITTQGSAGALVHTPEKTYDIPPAHTRRVVDPTGCGDAFRAGLIYGIQHNYDWLTIGRMGNLMGALKVEHPGTQNQRFDFAEFNDQFKQYFGYAL

SEQ ID NO: 915 - DNA, 963 bp, synthetic construct
  misc_feature 1..963: note = Variant of adenosine kinase
  source 1..963: mol_type = other DNA
atgcaccatcatcaccatcacgggggctccggcatgagtgcactgatttgcggttctttagcgtatgataccatcatggtgtttccggaccagttcaagaaccatattctgcccgatcgtgttcaccgcctcaatgtcagctttcttgtaccacgcatgcgtcgtgaatttggaggctgtgccggcaacattgcgtacaatctgcatctgttgggtggtgctccgatcgtaatggctacggtgggccaagatttcggtccgtatcgcgagcacttcgaaactctgggcattgacttatcccgcgtcaagatcatcgatgatctgagtacaccgcaggccttcattaccaccgacatggatcataaccagattacggcgtttcatggcggcgcaatgatgcgttcgtacgaaaatcacgttcgtgatgtgccgggtgttaccttgggcctcgtaggtcctgatggacgcgagggcatgatccaaaatgccgaagaattttgggctggtggcattccgttcatttttgacccaggtcaggcactgccgctgttcaacggccccgaactgcgcgagtttatcgaacaggcggactatgtggtggtcaacgattacgaaagcaatcttcttcaaacgcgtactggctggaacgagcaggacattgtttcacgcgtgcaggcgtatatcaccacgcaaggttcggctggagccctggtacatacaccggagaagacctacgatattccgccggctcacacccgtcgtgtcgttgatccaactggttgcggcgacgcgtttcgcgccggcctgatctatggtattcagcataattatgattggttgaccattggccgcatgggaaacttaatgggtgcgctgaaagtggaacaccctggcacccaaaatcagcgtttcgattttgccgaattcaacgaccagttcaaacaatattttggctacgcgctc

SEQ ID NO: 916 - protein, 321 aa, synthetic construct
  REGION 1..321: note = Variant of adenosine kinase
MHHHHHHGGSGMSALICGSLAYDTIMVFPDQFKNHILPDRVHRLNVSFLVPRMRREFGGCAGNIAYNLHLLGGAPIVMATVGQDFGPYREHFETLGIDLSRVKIIDDLSTPQAFITTDMDHNQITAFHGGAMMRSYENHVRDVPGVTLGLVGPDGREGMIQNAEEFWAGGIPFIFDPGQALPLFNGPELREFIEQADYVVVNDYESNLLQTRTGWNEQDIVSRVQAYITTQGSAGALVHTPEKTYDIPPAHTRRVVDPTGCGDAFRAGLIYGIQHNYDWLTIGRMGNLMGALKVEHPGTQNQRFDFAEFNDQFKQYFGYAL

SEQ ID NO: 917 - DNA, 963 bp, synthetic construct
  misc_feature 1..963: note = Variant of adenosine kinase
  source 1..963: mol_type = other DNA
atgcaccatcatcaccatcacgggggctccggcatgagtgcactgatttgcggttctttagcgtatgataccatcatggtgtttccggaccagttcaagaaccatattctgcccgatcgtgttcaccgcctcaatgtcagctttcttgtaccacgcatgcgtcgtgaatttggaggctgtgccggcaacattgcgtacaatctgcatctgttgggtggtgctccgatcgtaatggctacggtgggccaagatttcggtccgtatcgcgagcacttcgaaactctgggcattgacttatcccgcgtcaagatcatcgatgatctgagtacaccgcaggccttcattaccaccgacatggatcataaccagattacggcgtttcatggcggcgcaatgatgcgttcgtacgaaaatcacgttcgtgatgtgccgggtgttaccttgggcctcgtaggtcctgatggacgcgagggcatgatccaaaatgccgaagaatttgctgctggtcatattccgttcatttttgacccaggtcaggcactgccgctgttcaacggccccgaactgcgcgagtttatcgaacaggcggactatgtggtggtcaacgattacgaaagcaatcttcttcaaacgcgtactggctggaacgagcaggacattgtttcacgcgtgcaggcgtatatcaccacgcaaggttcggctggagccctggtacatacaccggagaagacctacgatattccgccggctcacacccgtcgtgtcgttgatccaactggttgcggcgacgcgtttcgcgccggcctgatctatggtattcagcataattatgattggttgaccattggccgcatgggaaacttaatgggtgcgctgaaagtggaacaccctggcacccaaaatcagcgtttcgattttgccgaattcaacgaccagttcaaacaatattttggctacgcgctc

SEQ ID NO: 918 - protein, 321 aa, synthetic construct
  REGION 1..321: note = Variant of adenosine kinase
MHHHHHHGGSGMSALICGSLAYDTIMVFPDQFKNHILPDRVHRLNVSFLVPRMRREFGGCAGNIAYNLHLLGGAPIVMATVGQDFGPYREHFETLGIDLSRVKIIDDLSTPQAFITTDMDHNQITAFHGGAMMRSYENHVRDVPGVTLGLVGPDGREGMIQNAEEFAAGHIPFIFDPGQALPLFNGPELREFIEQADYVVVNDYESNLLQTRTGWNEQDIVSRVQAYITTQGSAGALVHTPEKTYDIPPAHTRRVVDPTGCGDAFRAGLIYGIQHNYDWLTIGRMGNLMGALKVEHPGTQNQRFDFAEFNDQFKQYFGYAL

SEQ ID NO: 919 - DNA, 963 bp, synthetic construct
  misc_feature 1..963: note = Variant of adenosine kinase
  source 1..963: mol_type = other DNA
atgcaccatcatcaccatcacgggggctccggcatgagtgcactgatttgcggttctttagcgtatgataccatcatggtgtttccggaccagttcaagaaccatattctgcccgatcgtgttcaccgcctcaatgtcagctttcttgtaccacgcatgcgtcgtgaatttggaggctgtgccggcaacattgcgtacaatctgcatctgttgggtggtgctccgatcgtaatggctacggtgggccaagatttcggtccgtatcgcgagcacttcgaaactctgggcattgacttatcccgcgtcaagatcatcgatgatctgagtacaccgcaggccttcattaccaccgacatggatcataaccagattacggcgtttcatggcggcgcaatgatgcgttcgtacgaaaatcacgttcgtgatgtgccgggtgttaccttgggcctcgtaggtcctgatggacgcgagggcatgatccaaaatgccgaagaatttgctgctggtggcattccgttcatttttgacccaggtcaggcactgccgctgttcaacggccccgaactgcgcgagtttatcgaacaggcggactatgtggtggtcaacgattacgaaagcaatcttcttcaaacgcgtactggctggaacgagcaggacattgtttcacgcgtgcaggcgtatatcaccacgcaaggttcggctggagccctggtacatacaccggagaagacctacgatattccgccggctcacacccgtcgtgtcgttgatccaactggttgcggcgacgcgtttcgcgccggcctgatctatggtattcagcataattatgattggttgaccattggccgcatgggaaacttaatgggtgcgctgaaagtggaacaccctggcacgcaaaatcagatgttcgattttgccgaattcaacgaccagttcaaacaatattttggctacgcgctc

SEQ ID NO: 920 - protein, 321 aa, synthetic construct
  REGION 1..321: note = Variant of adenosine kinase
MHHHHHHGGSGMSALICGSLAYDTIMVFPDQFKNHILPDRVHRLNVSFLVPRMRREFGGCAGNIAYNLHLLGGAPIVMATVGQDFGPYREHFETLGIDLSRVKIIDDLSTPQAFITTDMDHNQITAFHGGAMMRSYENHVRDVPGVTLGLVGPDGREGMIQNAEEFAAGGIPFIFDPGQALPLFNGPELREFIEQADYVVVNDYESNLLQTRTGWNEQDIVSRVQAYITTQGSAGALVHTPEKTYDIPPAHTRRVVDPTGCGDAFRAGLIYGIQHNYDWLTIGRMGNLMGALKVEHPGTQNQMFDFAEFNDQFKQYFGYAL

SEQ ID NO: 921 - DNA, 963 bp, synthetic construct
  misc_feature 1..963: note = Variant of adenosine kinase
  source 1..963: mol_type = other DNA
atgcaccatcatcaccatcacgggggctccggcatgagtgcactgatttgcggttctttagcgtatgataccatcatggtgtttccggaccagttcaagaaccatattctgcccgatcgtgttcaccgcctcaatgtcagctttcttgtaccacgcatgcgtcgtgaatttggaggctgtgccggcaacattgcgtacaatctgcatctgttgggtggtgctccgatcgtaatggctacggtgggccaagatttcggtccgtatcgcgagcacttcgaaactctgggcattgacttatcccgcgtcaagatcatcgatgatctgagtacaccgcaggccttcattaccaccgacatggatcataaccagattacggcgtttcatggcggcgcaatgatgcgttcgtacgaaaatcacgttcgtgatgtgccgggtgttaccttgggcctcgtaggtcctgatggacgcgagggcatgatccaaaatgccgaagaatttgctgctggtggcattccgttcatttttgacccaggtcaggcactgccgctgttcaacggccccgaactgcgcgagtttatcgaacaggcggactatgtggtggtcaacgattacgaaagcaatcttcttcaaacgcgtactggctggaacgagcaggacattgttggtcgcgtgcaggcgtatatcaccacgcaaggttcggctggagccctggtacatacaccggagaagacctacgatattccgccggctcacacccgtcgtgtcgttgatccaactggttgcggcgacgcgtttcgcgccggcctgatctatggtattcagcataattatgattggttgaccattggccgcatgggaaacttaatgggtgcgctgaaagtggaacaccctggcacccaaaatcagcgtttcgattttgccgaattcaacgaccagttcaaacaatattttggctacgcgctc

SEQ ID NO: 922 - protein, 321 aa, synthetic construct
  REGION 1..321: note = Variant of adenosine kinase
MHHHHHHGGSGMSALICGSLAYDTIMVFPDQFKNHILPDRVHRLNVSFLVPRMRREFGGCAGNIAYNLHLLGGAPIVMATVGQDFGPYREHFETLGIDLSRVKIIDDLSTPQAFITTDMDHNQITAFHGGAMMRSYENHVRDVPGVTLGLVGPDGREGMIQNAEEFAAGGIPFIFDPGQALPLFNGPELREFIEQADYVVVNDYESNLLQTRTGWNEQDIVGRVQAYITTQGSAGALVHTPEKTYDIPPAHTRRVVDPTGCGDAFRAGLIYGIQHNYDWLTIGRMGNLMGALKVEHPGTQNQRFDFAEFNDQFKQYFGYAL

SEQ ID NO: 923 - DNA, 963 bp, synthetic construct
  misc_feature 1..963: note = Variant of adenosine kinase
  source 1..963: mol_type = other DNA
atgcaccatcatcaccatcacgggggctccggcatgagtgcactgatttgcggttctttagcgtatgataccatcatggtgtttccggaccagttcaagaaccatattctgcccgatcgtgttcacgtgctcaatgtcagctttcttgtaccacgcatgcgtcgtgaatttggaggctgtgccggcaacattgcgtacaatctgcatctgttgggtggtgctccgatcgtaatggctacggtgggccaagatttcggtccgtatcgcgagcacttcgaaactctgggcattgacttatcccgcgtcaagatcatcgatgatctgagtacaccgcaggccttcattaccaccgacatggatcataaccagattacggcgtttcatggcggcgcaatgatgcgttcgtacgaaaatcacgttcgtgatgtgccgggtgttaccttgggcctcgtaggtcctgatggacgcgagggcatgatccaaaatgccgaagaatttgctgctggtggcattccgttcatttttgacccaggtcaggcactgccgctgttcaacggccccgaactgcgcgagtttatcgaacaggcggactatgtggtggtcaacgattacgaaagcaatcttcttcaaacgcgtactggctggaacgagcaggacattgtttcacgcgtgcaggcgtatatcaccacgcaaggttcggctggagccctggtacatacaccggagaagacctacgatattccgccggctcacacccgtcgtgtcgttgatccaactggttgcggcgacgcgtttcgcgccggcctgatctatggtattcagcataattatgattggttgaccattggccgcatgggaaacttaatgggtgcgctgaaagtggaacaccctggcacccaaaatcagcgtttcgattttgccgaattcaacgaccagttcaaacaatattttggctacgcgctc

SEQ ID NO: 924 - protein, 321 aa, synthetic construct
  REGION 1..321: note = Variant of adenosine kinase
MHHHHHHGGSGMSALICGSLAYDTIMVFPDQFKNHILPDRVHVLNVSFLVPRMRREFGGCAGNIAYNLHLLGGAPIVMATVGQDFGPYREHFETLGIDLSRVKIIDDLSTPQAFITTDMDHNQITAFHGGAMMRSYENHVRDVPGVTLGLVGPDGREGMIQNAEEFAAGGIPFIFDPGQALPLFNGPELREFIEQADYVVVNDYESNLLQTRTGWNEQDIVSRVQAYITTQGSAGALVHTPEKTYDIPPAHTRRVVDPTGCGDAFRAGLIYGIQHNYDWLTIGRMGNLMGALKVEHPGTQNQRFDFAEFNDQFKQYFGYAL

SEQ ID NO: 925 - DNA, 963 bp, synthetic construct
  misc_feature 1..963: note = Variant of adenosine kinase
  source 1..963: mol_type = other DNA
atgcaccatcatcaccatcacgggggctccggcatgagtgcactgatttgcggttctttagcgtatgataccatcatggtgtttccggaccagttcaagaaccatattctgcccgatcgtgttcaccgcctcaatgtcagctttcttgtaccacgcatgcgtcgtgaatttggaggctgtgccggcaacattgcgtacaatctgcatctgttgggtggtgctccgatcgtaatggctacggtgggcgtggatttcggtccgtatcgcgagcacttcgaaactctgggcattgacttatcccgcgtcaagatcatcgatgatctgagtacaccgcaggccttcattaccaccgacatggatcataaccagattacggcgtttcatggcggcgcaatgatgcgttcgtacgaaaatcacgttcgtgatgtgccgggtgttaccttgggcctcgtaggtcctgatggacgcgagggcatgatccaaaatgccgaagaatttgctgctggtggcattccgttcatttttgacccaggtcaggcactgccgctgttcaacggccccgaactgcgcgagtttatcgaacaggcggactatgtggtggtcaacgattacgaaagcaatcttcttcaaacgcgtactggctggaacgagcaggacattgtttcacgcgtgcaggcgtatatcaccacgcaaggttcggctggagccctggtacatacaccggagaagacctacgatattccgccggctcacacccgtcgtgtcgttgatccaactggttgcggcgacgcgtttcgcgccggcctgatctatggtattcagcataattatgattggttgaccattggccgcatgggaaacttaatgggtgcgctgaaagtggaacaccctggcacccaaaatcagcgtttcgattttgccgaattcaacgaccagttcaaacaatattttggctacgcgctc

SEQ ID NO: 926 - protein, 321 aa, synthetic construct
  REGION 1..321: note = Variant of adenosine kinase
MHHHHHHGGSGMSALICGSLAYDTIMVFPDQFKNHILPDRVHRLNVSFLVPRMRREFGGCAGNIAYNLHLLGGAPIVMATVGVDFGPYREHFETLGIDLSRVKIIDDLSTPQAFITTDMDHNQITAFHGGAMMRSYENHVRDVPGVTLGLVGPDGREGMIQNAEEFAAGGIPFIFDPGQALPLFNGPELREFIEQADYVVVNDYESNLLQTRTGWNEQDIVSRVQAYITTQGSAGALVHTPEKTYDIPPAHTRRVVDPTGCGDAFRAGLIYGIQHNYDWLTIGRMGNLMGALKVEHPGTQNQRFDFAEFNDQFKQYFGYAL

SEQ ID NO: 927 - DNA, 963 bp, synthetic construct
  misc_feature 1..963: note = Variant of adenosine kinase
  source 1..963: mol_type = other DNA
atgcaccatcatcaccatcacgggggctccggcatgagtgcactgatttgcggttctttagcgtatgataccatcatggtgtttccggaccagttcaagaaccatattctgcccgatcgtgttcaccgcctcaatgtcagctttcttgtaccacgcatgcgtcgtgaatttggaggctgtgccggcaacattgcgtacaatctgcatctgttgggtggtgctccgatcgtaatggctacggtgggccaagatttcggtccgtatcgcgagcacttcgaaactctgggcattgacttatcccgcgtcaagatcatcgatgatctgagtacaccgcagtcgttcattaccaccgacatggatcataaccagattacggcgtttcacggcggcgcaatgatgcgttcgtacgaaaatcacgttcgtgatgtgccgggtgttaccttgggcctcgtaggtcctgatggacgcgagggcatgatccaaaatgccgaagaatttgctgctggtggcattccgttcatttttgacccaggtcaggcagtgccgctgttcaacggccccgaactgcgcgagtttatcgaacaggcggactatgtggtggtcaacgattacgaaagcaatcttcttcaagcccgtactggctggaacgagcaggacattgtttcacgcgtgcaggcgtatatcaccacgcaaggttcggctggagccctggtacatacaccggagaagacctacgatattccgccggctcacacccgtcgtgtcgttgatccaactggttgcggcgacgcgtttcgcgccggcctgatctatggtattcagcataattatgattggttgaccattggccgcatgggaaacttaatgggtgcgctgaaagtggaacaccctggcacccaaaatcagcgtttcgattttgccgaattcaacgaccagttcaaacaatattttggctacgcgctc

SEQ ID NO: 928 - protein, 321 aa, synthetic construct
  REGION 1..321: note = Variant of adenosine kinase
MHHHHHHGGSGMSALICGSLAYDTIMVFPDQFKNHILPDRVHRLNVSFLVPRMRREFGGCAGNIAYNLHLLGGAPIVMATVGQDFGPYREHFETLGIDLSRVKIIDDLSTPQSFITTDMDHNQITAFHGGAMMRSYENHVRDVPGVTLGLVGPDGREGMIQNAEEFAAGGIPFIFDPGQAVPLFNGPELREFIEQADYVVVNDYESNLLQARTGWNEQDIVSRVQAYITTQGSAGALVHTPEKTYDIPPAHTRRVVDPTGCGDAFRAGLIYGIQHNYDWLTIGRMGNLMGALKVEHPGTQNQRFDFAEFNDQFKQYFGYAL

SEQ ID NO: 929 - DNA, 963 bp, synthetic construct
  misc_feature 1..963: note = Variant of adenosine kinase
  source 1..963: mol_type = other DNA
atgcaccatcatcaccatcacgggggctctggcatgagtgcactgatttgcggttctttagcgtatgataccatcatggtgtttccggaccagttcaagaaccatattctgcccgatcgtgttcaccgcctcaatgtcagctttcttgtaccacgcatgcgtcgtgaatttggaggctgtgccggcaacattgcgtacaatctgcatctgttgggtggtgctccgatcgtaatggctacggtgggccaagatttcggtccgtatcgcgagcacttcgaaactctgggcattgacttatcccgcgtcaagatcatcgatgatctgagtacaccgcaggccttcattaccaccgacatggatcataaccagattacggcgtttcacggcggcgcaatgatgcgttcgtacgaaaatcacgttcgtgatgtgccgggtgttaccttgggcctcgtaggtcctgatggacgcgagggcatgatccaaaatgccgaagaatttgctgctggtggcattccgttcatttttgacccaggtcaggcactgccgctgttcaacggccccgaactgcgcgagtttatcgaacaggcggactatgtggtggtcaacgattacgaaagcaatcttcttcaaacgcgtactggctggaacgagcaggacattgtttcacgcgtgcaggcgtatatcaccacgcaaggttcggctggagccctggtacatacaccggagaagacctacgatattccgccggctaaaacccgtcgtgtcgttgatccaactggttgcggcgacgcgtttcgcgccggcctgatctatggtattcagcataattatgattggttgaccattggccgcatgggaaacttaatgggtgcgctgaaagtggaacaccctggcacccaaaatcagcgtttcgattttgccgaattcaacgaccagttcaaacaatattttggctacgcgctc

SEQ ID NO: 930 - protein, 321 aa, synthetic construct
  REGION 1..321: note = Variant of adenosine kinase
MHHHHHHGGSGMSALICGSLAYDTIMVFPDQFKNHILPDRVHRLNVSFLVPRMRREFGGCAGNIAYNLHLLGGAPIVMATVGQDFGPYREHFETLGIDLSRVKIIDDLSTPQAFITTDMDHNQITAFHGGAMMRSYENHVRDVPGVTLGLVGPDGREGMIQNAEEFAAGGIPFIFDPGQALPLFNGPELREFIEQADYVVVNDYESNLLQTRTGWNEQDIVSRVQAYITTQGSAGALVHTPEKTYDIPPAKTRRVVDPTGCGDAFRAGLIYGIQHNYDWLTIGRMGNLMGALKVEHPGTQNQRFDFAEFNDQFKQYFGYAL

SEQ ID NO: 931 - DNA, 963 bp, synthetic construct
  misc_feature 1..963: note = Variant of adenosine kinase
  source 1..963: mol_type = other DNA
atgcaccatcatcaccatcacgggggctccggcatgagtgcactgatttgcggttctttagcgtatgataccatcatggtgtttccggaccagttcaagaaccatattctgcccgatcgtgttcaccgcctcaatgtcagctttcttgtaccacgcatgcgtcgtgaatttggaggctgtgccggcaacattgcgtacaatctgcatctgttgggtggtgctccgatcgtaatggctacggtgggccaagatttcggtccgtatcgcgagcacttcgaaactctgggcattgacttatcccgcgtcaagatcatcgatgatctgagtacaccgcaggccttcattaccaccgacatggatcataaccagattacggcgtttcatggcggcgcaatgatgcgttcgtacgaaaatcacgttcgtgatgtgccgggtgttaccttgggcctcgtaggtcctgatggacgcgagggcatgatccaaaatgccgaagaatttgctgctggtggcattccgttcatttttgacccaggtcaggcactgccgctgttcaacggcgttgaactgcgcgagtttatcgaacaggcggactatgtggtggtcaacgattacgaaagcaatcttcttcaaacgcgtactggctggaacgagcaggacattgtttcacgcgtgcaggcgtatatcaccacgcaaggttcggctggagccctggtacatacaccggagaagacctacgatattccgccggctcacacccgtcgtgtcgttgatccaactggttgcggcgacgcgtttcgcgccggcctgatctatggtattcagcataattatgattggttgaccattggccgcatgggaaacttaatgggtgcgctgaaagtggaacaccctggcacccaaaatcagcgtttcgattttgccgaattcaacgaccagttcaaacaatattttggctacgcgctc

SEQ ID NO: 932 - protein, 321 aa, synthetic construct
  REGION 1..321: note = Variant of adenosine kinase
MHHHHHHGGSGMSALICGSLAYDTIMVFPDQFKNHILPDRVHRLNVSFLVPRMRREFGGCAGNIAYNLHLLGGAPIVMATVGQDFGPYREHFETLGIDLSRVKIIDDLSTPQAFITTDMDHNQITAFHGGAMMRSYENHVRDVPGVTLGLVGPDGREGMIQNAEEFAAGGIPFIFDPGQALPLFNGVELREFIEQADYVVVNDYESNLLQTRTGWNEQDIVSRVQAYITTQGSAGALVHTPEKTYDIPPAHTRRVVDPTGCGDAFRAGLIYGIQHNYDWLTIGRMGNLMGALKVEHPGTQNQRFDFAEFNDQFKQYFGYAL

SEQ ID NO: 933 - DNA, 963 bp, synthetic construct
  misc_feature 1..963: note = Variant of adenosine kinase
  source 1..963: mol_type = other DNA
atgcaccatcatcaccatcacgggggatccggcatgagtgcactgatttgcggttctttagcgtatgataccatcatggtgtttccggaccagttcaagaaccatattctgcccgatcgtgttcaccgcctcaatgtcagctttcttgtaccacgcatgcgtcgtgaatttggaggctgtgccggcaacattgcgtacaatctgcatctgttgggtggtgctccgatcgtaatggctacggtgggccaagatttcggtccgtatcgcgagcacttcgaaactctgggcattgacttatcccgcgtcaagatcatcgatgatctgagtacaccgcaggccttcattaccaccgacatggatcataaccagattacggcgtttcatggcggcgcaatgatgcgttcgtacgaaaatcacgttcgtgatgtgccgggtgttaccttgggcctcgtaggtcctgatggacgcgagggcatgatccaaaatgccgaagaatttgctgctggtggcattccgttcatttttgacccaggtcaggcactgccgctgttcaacggccccgaactgcgcgagtttatcgaacaggcggactatgtggtggtcaacgattacgaaagcaatcttcttcaaacgcgtactggctggaacgaggtggacattgtttcacgcgtgcaggcgtatatcaccacgcaaggttcggctggagccctggtacatacaccggagaagacctacgatattccgccggctcacacccgtcgtgtcgttgatccaactggttgcggcgacgcgtttcgcgccggcctgatctatggtattcagcataattatgattggttgaccattggccgcatgggaaacttaatgggtgcgctgaaagtggaacaccctggcacccaaaatcagcgtttcgattttgccgaattcaacgaccagttcaaacaatattttggctacgcgctc

SEQ ID NO: 934 - protein, 321 aa, synthetic construct
  REGION 1..321: note = Variant of adenosine kinase
MHHHHHHGGSGMSALICGSLAYDTIMVFPDQFKNHILPDRVHRLNVSFLVPRMRREFGGCAGNIAYNLHLLGGAPIVMATVGQDFGPYREHFETLGIDLSRVKIIDDLSTPQAFITTDMDHNQITAFHGGAMMRSYENHVRDVPGVTLGLVGPDGREGMIQNAEEFAAGGIPFIFDPGQALPLFNGPELREFIEQADYVVVNDYESNLLQTRTGWNEVDIVSRVQAYITTQGSAGALVHTPEKTYDIPPAHTRRVVDPTGCGDAFRAGLIYGIQHNYDWLTIGRMGNLMGALKVEHPGTQNQRFDFAEFNDQFKQYFGYAL

SEQ ID NO: 935 - DNA, 963 bp, synthetic construct
  misc_feature 1..963: note = Variant of adenosine kinase
  source 1..963: mol_type = other DNA
atgcaccatcatcaccatcacgggggctccggcatgagtgcactgatttgcggttctttagcgtatgataccatcatggtgtttccggaccagttcaagaaccatattctgcccgatcgtgttcaccgcctcaatgtcagctttcttgtaccacgcatgcgtcgtgaatttggaggctgtgccggcaacattgcgtacaatctgcatctgttgggtggtgctccgatcgtaatggctacggtgggccaagatttcggtccgtatcgcgagcacttcgaaactctgggcattgacttatcccgcgtcaagatcatcgatgatctgagtacaccgcaggccttcattaccaccgacatggatcataaccagattacggcgtttcacggcggcgcaatgatgcgttcgtacgaaaatcacgttcgtgatgtgccgggtgttaccttgggcctcgtaggtcctgatggacgcgagggcatgatccaaaatgccgaagaatttgctgctggtggcattccgttcatttttgacccaggtcaggcagtgccgctgttcaacggccccgaactgcgcgagtttatcgaacaggcggactatgtggtggtcaacgattacgaaagcaatcttcttcaaacccgtactggctggaacgagcaggacattgtttcacgcgtgcaggcgtatatcaccacgcaaggttcggctggagccctggtacatacaccggagaagacctacgatattccgccggctaaaacccgtcgtgtcgttgatccaactggttgcggcgacgcgtttcgcgccggcctgatctatggtattcagcataattatgattggttgaccattggccgcatgggaaacttaatgggtgcgctgaaagtggaacaccctggcacccaaaatcagcgtttcgattttgccgaattcaacgaccagttcaaacaatattttggctacgcgctc

SEQ ID NO: 936 - protein, 321 aa, synthetic construct
  REGION 1..321: note = Variant of adenosine kinase
MHHHHHHGGSGMSALICGSLAYDTIMVFPDQFKNHILPDRVHRLNVSFLVPRMRREFGGCAGNIAYNLHLLGGAPIVMATVGQDFGPYREHFETLGIDLSRVKIIDDLSTPQAFITTDMDHNQITAFHGGAMMRSYENHVRDVPGVTLGLVGPDGREGMIQNAEEFAAGGIPFIFDPGQAVPLFNGPELREFIEQADYVVVNDYESNLLQTRTGWNEQDIVSRVQAYITTQGSAGALVHTPEKTYDIPPAKTRRVVDPTGCGDAFRAGLIYGIQHNYDWLTIGRMGNLMGALKVEHPGTQNQRFDFAEFNDQFKQYFGYAL

SEQ ID NO: 937 - DNA, 963 bp, synthetic construct
  misc_feature 1..963: note = Variant of adenosine kinase
  source 1..963: mol_type = other DNA
atgcaccatcatcaccatcacgggggctccggcatgagtgcactgatttgcggttctttagcgtatgataccatcatggtgtttccggaccagttcaagaaccatattctgcccgatcgtgttcaccgcctcaatgtcagctttcttgtaccacgcatgcgtcgtgaatttggaggctgtgccggcaacattgcgtacaatctgcatctgttgggtggtgctccgatcgtaatggctacggtgggccaagatttcggtccgtatcgcgagcacttcgaaactctgggcattgacttatcccgcgtcaagatcatcgatgatctgagtacaccgcaggccttcattaccaccgacatggatcataaccagattacggcgtttcatggcggcgcaatgatgcgttcgtacgaaaatcacgttcgtgatgtgccgggtgttaccttgggcctcgtaggtcctgatggacgcgagggcatgatccaaaatgccgaagaatttgctgctggtggcattccgttcatttttgacccaggtcaggcactgccgctgttcaacggccccgaactgcgcgagtttatcgaaacggcggactatgtggtggtcaacgattacgaaagcaatcttcttcaaacgcgtactggctggaacgagcaggacattgtttcacgcgtgcaggcgtatatcaccacgcaaggttcggctggagccctggtacatacaccggagaagacctacgatattccgccggctcacacccgtcgtgtcgttgatccaactggttgcggcgacgcgtttcgcgccggcctgatctatggtattcagcataattatgattggttgaccattggccgcatgggaaacttaatgggtgcgctgaaagtggaacaccctggcacccaaaatcagcgtttcgattttgccgaattcaacgaccagttcaaacaatattttggctacgcgctc

SEQ ID NO: 938 - protein, 321 aa, synthetic construct
  REGION 1..321: note = Variant of adenosine kinase
MHHHHHHGGSGMSALICGSLAYDTIMVFPDQFKNHILPDRVHRLNVSFLVPRMRREFGGCAGNIAYNLHLLGGAPIVMATVGQDFGPYREHFETLGIDLSRVKIIDDLSTPQAFITTDMDHNQITAFHGGAMMRSYENHVRDVPGVTLGLVGPDGREGMIQNAEEFAAGGIPFIFDPGQALPLFNGPELREFIETADYVVVNDYESNLLQTRTGWNEQDIVSRVQAYITTQGSAGALVHTPEKTYDIPPAHTRRVVDPTGCGDAFRAGLIYGIQHNYDWLTIGRMGNLMGALKVEHPGTQNQRFDFAEFNDQFKQYFGYAL

SEQ ID NO: 939 - DNA, 963 bp, synthetic construct
  misc_feature 1..963: note = Variant of adenosine kinase
  source 1..963: mol_type = other DNA
atgcaccatcatcaccatcacgggggctccggcatgagtgcactgatttgcggttctttagcgtatgataccatcatggtgtttccggaccagttcaagaaccatattctgcccgatcgtgttcaccgcctcaatgtcagctttcttgtaccacgcatgcgtcgtgagtttggaggctgtgccggcaacattgcgtacaatctgcatctgttgggtggtgctccgatcgtaatggctacggtgggccaagatttcggtccgtatcgcgagcacttcgaaactctgggcattgacttatcccgcgtcaagatcatcgatgatctgagtacaccgcaggccttcattaccaccgacatggatctgaaccagattacggcgtttcatggcggcgcaatgatgcgttcgtacgaaaatcacgttcgtgatgtgccgggtgttaccttgggcctcgtaggtcctgatggacgcgagggcatgatccaaaatgccgaagaatttgctgctggtggcattccgttcatttttgacccaggtcaggcactgccgctgttcaacggccccgaactgcgcgagtttatcgaacaggcggactatgtggtggtcaacgattacgaaagcaatcttcttcaaacgcgtactggctggaacgagcaggacattgtttcacgcgtgcaggcgtatatcgttacgcaaggttcggctggagccctggtacatacaccggagaagacctacgatattccgccggctcacacccgtcgtgtcgttgatccaactggttgcggcgacgcgtttcgcgccggcctgatctatggtattcagcataattatgattggttgaccattggccgcatgggaaacttaatgggtgcgctgaaagtggaacaccctggcacccaaaatcagcgtttcgattttgccgaattcaacgaccagttcaaacaatattttggctacgcgctc

SEQ ID NO: 940 - protein, 321 aa, synthetic construct
  REGION 1..321: note = Variant of adenosine kinase
MHHHHHHGGSGMSALICGSLAYDTIMVFPDQFKNHILPDRVHRLNVSFLVPRMRREFGGCAGNIAYNLHLLGGAPIVMATVGQDFGPYREHFETLGIDLSRVKIIDDLSTPQAFITTDMDLNQITAFHGGAMMRSYENHVRDVPGVTLGLVGPDGREGMIQNAEEFAAGGIPFIFDPGQALPLFNGPELREFIEQADYVVVNDYESNLLQTRTGWNEQDIVSRVQAYIVTQGSAGALVHTPEKTYDIPPAHTRRVVDPTGCGDAFRAGLIYGIQHNYDWLTIGRMGNLMGALKVEHPGTQNQRFDFAEFNDQFKQYFGYAL

SEQ ID NO: 941 - DNA, 963 bp, synthetic construct
  misc_feature 1..963: note = Variant of adenosine kinase
  source 1..963: mol_type = other DNA
atgcaccatcatcaccatcacgggggctccggcatgagtgcactgatttgcggttctttagcgtatgataccatcatggtgtttccggaccagttcaagaaccatattctgcccgatcgtgttcaccgcctcaatgtcagctttcttgtaccacgcatgcgtcgtgaatttggaggctgtgccggcaacattgcgtacaatctgcatctgttgggtggtgctccgatcgtaatggctacggtgggccaagatttcggtccgtatcgcgagcacttcgaaactctgggcattgacttatcccgcgtcaagatcatcgatcatctgagtacaccgcaggccttcattaccaccgacatggatcataaccagattacggcgtttcatggcggcgcaatgatgcgttcgtacgaaaatcacgttcgtgatgtgccgggtgttaccttgggcctcgtaggtcctgatggacgcgagggcatgatccaaaatgccgaagaatttgctgctggtggcattccgttcatttttgacccaggtcaggcactgccgctgttcaacggccccgaactgcgcgagtttatcgaacaggcggactatgtggtggtcaacgattacgaaagcaatcttcttcaaacgcgtactggctggaacgagcaggacattgtttcacgcgtgcaggcgtatatcaccacgcaaggttcggctggagccctggtacatacaccggagaagacctacgatattccgccggctcacacccgtcgtgtcgttgatccaactggttgcggcgacgcgtttcgcgccggcctgatctatggtattcagcataattatgattggttgaccattggccgcatgggaaacttaatgggtgcgctgaaagtggaacaccctggcacccaaaatcagcgtttcgattttgccgaattcaacgaccagttcaaacaatattttggctacgcgctc

SEQ ID NO: 942 - protein, 321 aa, synthetic construct
  REGION 1..321: note = Variant of adenosine kinase
MHHHHHHGGSGMSALICGSLAYDTIMVFPDQFKNHILPDRVHRLNVSFLVPRMRREFGGCAGNIAYNLHLLGGAPIVMATVGQDFGPYREHFETLGIDLSRVKIIDHLSTPQAFITTDMDHNQITAFHGGAMMRSYENHVRDVPGVTLGLVGPDGREGMIQNAEEFAAGGIPFIFDPGQALPLFNGPELREFIEQADYVVVNDYESNLLQTRTGWNEQDIVSRVQAYITTQGSAGALVHTPEKTYDIPPAHTRRVVDPTGCGDAFRAGLIYGIQHNYDWLTIGRMGNLMGALKVEHPGTQNQRFDFAEFNDQFKQYFGYAL

SEQ ID NO: 943 - DNA, 963 bp, synthetic construct
  misc_feature 1..963: note = Variant of adenosine kinase
  source 1..963: mol_type = other DNA
atgcaccatcatcaccatcacgggggctccggcatgagtgcactgatttgcggttctttagcgtatgataccatcatggtgtttccggaccagttcaagaaccatattctgcccgatcgtgttcaccgcctcaatgtcagctttcttgtaccacgcatgcgtcgtgaatttggaggctgtgccggcaacattgcgtacaatctgcatctgttgggtggtgctccgatcgtaatggctacggtgggccaagatttcggtccgtatcgcgagcacttcgaaactctgggcattgacttatcccgcgtcaagatcatcgatgatctgagtacaccgcaggccttcattaccaccgacatggatcataaccagattacggcgtttcatggcggcgcaatgatgcgttcgtacgaaaatcacgttagtgatgtgccgggtgttaccttgggcctcgtaggtcctgatggacgcgagggcatgatccaaaatgccgaagaatttgctgctggtggcattccgttcatttttgacccaggtcaggcactgccgctgttcaacggccccgaactgcgcgagtttatcgaacaggcggactatgtggtggtcaacgattacgaaagcaatcttcttcaaacgcgtactggctggaacgagcaggacattgtttcacgcgtgcaggcgtatatcaccacgcaaggttcggctggagccctggtacatacaccggagaagacctacgatattccgccggctcacacccgtcgtgtcgttgatccaactggttgcggcgacgcgtttcgcgccggcctgatctatggtattcagcataattatgattggttgaccattggccgcatgggaaacttaatgggtgcgctgaaagtggaacaccctggcacccaaaatcagcgtttcgattttgccgaattcaacgaccagttcaaacaatattttggctacgcgctc

SEQ ID NO: 944 - protein, 321 aa, synthetic construct
  REGION 1..321: note = Variant of adenosine kinase
MHHHHHHGGSGMSALICGSLAYDTIMVFPDQFKNHILPDRVHRLNVSFLVPRMRREFGGCAGNIAYNLHLLGGAPIVMATVGQDFGPYREHFETLGIDLSRVKIIDDLSTPQAFITTDMDHNQITAFHGGAMMRSYENHVSDVPGVTLGLVGPDGREGMIQNAEEFAAGGIPFIFDPGQALPLFNGPELREFIEQADYVVVNDYESNLLQTRTGWNEQDIVSRVQAYITTQGSAGALVHTPEKTYDIPPAHTRRVVDPTGCGDAFRAGLIYGIQHNYDWLTIGRMGNLMGALKVEHPGTQNQRFDFAEFNDQFKQYFGYAL

SEQ ID NO: 945 - DNA, 963 bp, synthetic construct
  misc_feature 1..963: note = Variant of adenosine kinase
  source 1..963: mol_type = other DNA
atgcaccatcatcaccatcacgggggctccggcatgagtgcactgatttgcggttctttagcgtatgataccatcatggtgtttccggacctgttcaagaaccatattctgcccgatcgtgttcaccgcctcaatgtcagctttcttgtaccacgcatgcgtcgtgaatttggaggctgtgccggcaacattgcgtacaatctgcatctgttgggtggtgctccgatcgtaatggctacggtgggccaagatttcggtccgtatcgcgagcacttcgaaactctgggcattgacttatcccgcgtcaagatcatcgatgatctgagtacaccgcaggccttcattaccaccgacatggatcataaccagattacggcgtttcatggcggcgcaatgatgcgttcgtacgaaaatcacgttcgtgatgtgccgggtgttaccttgggcctcgtaggtcctgatggacgcgagggcatgatccaaaatgccgaagaatttgctgctggtggcattccgttcatttttgacccaggtcaggcagtgccgctgttcaacggccccgaactgcgcgagtttatcgaacaggcggactatgtggtggtcaacgattacgaaagcaatcttcttcaaacgcgtactggctggaacgagcaggacattgtttcacgcgtgcaggcgtatatcaccacgcaaggttcggctggagccctggtacatacaccggagaagacctacgatattccgccggctcacacccgtcgtgtcgttgatccaactggttgcggcgacgcgtttcgcgccggcctgatctatggtattcagcataattatgattggttgaccattggccgcatgggaaacttaatgggtgcgctgaaagtggaacaccctggcacccaaaatcagcgtttcgattttgccgaattcaacgaccagttcaaacaatattttggctacgcgctc

SEQ ID NO: 946 - protein, 321 aa, synthetic construct
  REGION 1..321: note = Variant of adenosine kinase
MHHHHHHGGSGMSALICGSLAYDTIMVFPDLFKNHILPDRVHRLNVSFLVPRMRREFGGCAGNIAYNLHLLGGAPIVMATVGQDFGPYREHFETLGIDLSRVKIIDDLSTPQAFITTDMDHNQITAFHGGAMMRSYENHVRDVPGVTLGLVGPDGREGMIQNAEEFAAGGIPFIFDPGQAVPLFNGPELREFIEQADYVVVNDYESNLLQTRTGWNEQDIVSRVQAYITTQGSAGALVHTPEKTYDIPPAHTRRVVDPTGCGDAFRAGLIYGIQHNYDWLTIGRMGNLMGALKVEHPGTQNQRFDFAEFNDQFKQYFGYAL

SEQ ID NO: 947 - DNA, 963 bp, synthetic construct
  misc_feature 1..963: note = Variant of adenosine kinase
  source 1..963: mol_type = other DNA
atgcaccatcatcaccatcacgggggctccggcatgagtgcactgatttgcggttctttagcgtatgataccatcatggtgtttccggaccagttcaagaaccatattctgcccgatcgtgttcaccgcctcaatgtcagctttcttgtaccacgcatgcgtcgtgaatttggaggctgtgccggcaacattgcgtacaatctgcatctgttgggtggtgctccgatcgtaatggctacggtgggccaagatttcggtccgtatcgcgagcacttcgaaactctgggcattgacttatcccgcgtcaagatcatcgatgatctgagtacaccgcaggccttcattaccaccgacatggatcataaccagattacggcgtttcatggcggcgcaatgatgcgttcgtacgaaaatcacgttcgtgatgtgccgggtgttaccttgggcctcgtaggtcctgatggacgcgagggcatgatccaaaatgccgaagaatttgctgctggtggcattccgttcatttttgacccaggtcaggcactgccgctgttcaacggccccgaactgcgcgagtttatcgaacaggcggactatgtggtggtcaacgattacgaaagcaatcttcttcaaacgcgtactggctggaacgagcaggacattgtttcacgcgtgcaggcgtatatcaccacgcaaggttcggctggagccctggtacatacaccggagaagacctacgatattccgccggctcacacccgtcgtgtcgttgatccaactggttgcggcgacgcgtttcgcgccggcctgatctatggtattcagcataattatgattggttgaccattggccgcatgggaaacttaatgggtgcgctgaaagtggaacaccctggcacgcaaaatcagcgtttcgatttttttgaattcaacgaccagttcaaacaatattttggctacgcgctc

SEQ ID NO: 948 - protein, 321 aa, synthetic construct
  REGION 1..321: note = Variant of adenosine kinase
MHHHHHHGGSGMSALICGSLAYDTIMVFPDQFKNHILPDRVHRLNVSFLVPRMRREFGGCAGNIAYNLHLLGGAPIVMATVGQDFGPYREHFETLGIDLSRVKIIDDLSTPQAFITTDMDHNQITAFHGGAMMRSYENHVRDVPGVTLGLVGPDGREGMIQNAEEFAAGGIPFIFDPGQALPLFNGPELREFIEQADYVVVNDYESNLLQTRTGWNEQDIVSRVQAYITTQGSAGALVHTPEKTYDIPPAHTRRVVDPTGCGDAFRAGLIYGIQHNYDWLTIGRMGNLMGALKVEHPGTQNQRFDFFEFNDQFKQYFGYAL

SEQ ID NO: 949 - DNA, 963 bp, synthetic construct
  misc_feature 1..963: note = Variant of adenosine kinase
  source 1..963: mol_type = other DNA
atgcaccatcatcaccatcacgggggctccggcatgagtgcactgatttgcggttctttagcgtatgataccatcatggtgtttccggaccagttcaagaaccatattctgcccgatcgtgttcaccgcctcaatgtcagctttcttgtaccacgcatgcgtcgtgaatttggaggctgtgccggcaacattgcgtacaatctgcatctgttgggtggtgctccgatcgtaatggctacggtgggccaagatttcggtccgtatcgcgagcacttcgaaactctgggcattgacttaggtcgcgtcaagatcatcgatgatctgagtacaccgcaggccttcattaccaccgacatggatcataaccagattacggcgtttcatggcggcgcaatgatgcgttcgtacgaaaatcacgttcgtgatgtgccgggtgttaccttgggcctcgtaggtcctgatggacgcgagggcatgatccaaaatgccgaagaatttgctgctggtggcattccgttcatttttgacccaggtcaggcactgccgctgttcaacggccccgaactgcgcgagtttatcgaacaggcggactatgtggtggtcaacgattacgaaagcaatcttcttcaaacgcgtactggctggaacgagcaggacattgtttcacgcgtgcaggcgtatatcaccacgcaaggttcggctggagccctggtacatacaccggagaagacctacgatattccgccggctcacacccgtcgtgtcgttgatccaactggttgcggcgacgcgtttcgcgccggcctgatctatggtattcagcataattatgattggttgaccattggccgcatgggaaacttaatgggtgcgctgaaagtggaacaccctggcacccaaaatcagcgtttcgattttgccgaattcaacgaccagttcaaacaatattttggctacgcgctc

SEQ ID NO: 950 - protein, 321 aa, synthetic construct
  REGION 1..321: note = Variant of adenosine kinase
MHHHHHHGGSGMSALICGSLAYDTIMVFPDQFKNHILPDRVHRLNVSFLVPRMRREFGGCAGNIAYNLHLLGGAPIVMATVGQDFGPYREHFETLGIDLGRVKIIDDLSTPQAFITTDMDHNQITAFHGGAMMRSYENHVRDVPGVTLGLVGPDGREGMIQNAEEFAAGGIPFIFDPGQALPLFNGPELREFIEQADYVVVNDYESNLLQTRTGWNEQDIVSRVQAYITTQGSAGALVHTPEKTYDIPPAHTRRVVDPTGCGDAFRAGLIYGIQHNYDWLTIGRMGNLMGALKVEHPGTQNQRFDFAEFNDQFKQYFGYAL

SEQ ID NO: 951 - DNA, 963 bp, synthetic construct
  misc_feature 1..963: note = Variant of adenosine kinase
  source 1..963: mol_type = other DNA
atgcaccatcatcaccatcacgggggctccggcatgagtgcactgatttgcggttctttagcgtatgataccatcatggtgtttccggaccagttcaagaaccatattctgcccgatcgtgttcaccgcctcaatgtcagctttcttgtaccacgcatgcgtcgtgaatttggaggctgtgccggcaacattgcgtacaatctgcatctgttgggtggtgctccgatcgtaatggctacggtgggccaagatttcggtccgtatcgcgagcacttcgaaactctgggcattgacttatcccgcgtcaagatcatcgatgatctgagtacaccgcaggccttcattaccaccgacatggatcataaccagattacggcgtttcatggcggcgcaatgatgcgttcgtacgaaaatcacgttcgtgatgtgccgggtgttaccttgggcctcgtaggtcctgatggacgcgagggcatgatccaaaatgccgaagaatttgctgctttgggcattccgttcatttttgacccaggtcaggcactgccgctgttcaacggccccgaactgcgcgagtttatcgaacaggcggactatgtggtggtcaacgattacgaaagcaatcttcttcaaacgcgtactggctggaacgagcaggacattgtttcacgcgtgcaggcgtatatcaccacgcaaggttcggctggagccctggtacatacaccggagaagacctacgatattccgccggctcacacccgtcgtgtcgttgatccaactggttgcggcgacgcgtttcgcgccggcctgatctatggtattcagcataattatgattggttgaccattggccgcatgggaaacttaatgggtgcgctgaaagtggaacaccctggcacccaaaatcagcgtttcgattttgccgaattcaacgaccagttcaaacaatattttggctacgcgctc

SEQ ID NO: 952 - protein, 321 aa, synthetic construct
  REGION 1..321: note = Variant of adenosine kinase
MHHHHHHGGSGMSALICGSLAYDTIMVFPDQFKNHILPDRVHRLNVSFLVPRMRREFGGCAGNIAYNLHLLGGAPIVMATVGQDFGPYREHFETLGIDLSRVKIIDDLSTPQAFITTDMDHNQITAFHGGAMMRSYENHVRDVPGVTLGLVGPDGREGMIQNAEEFAALGIPFIFDPGQALPLFNGPELREFIEQADYVVVNDYESNLLQTRTGWNEQDIVSRVQAYITTQGSAGALVHTPEKTYDIPPAHTRRVVDPTGCGDAFRAGLIYGIQHNYDWLTIGRMGNLMGALKVEHPGTQNQRFDFAEFNDQFKQYFGYAL

SEQ ID NO: 953 - DNA, 963 bp, synthetic construct
  misc_feature 1..963: note = Variant of adenosine kinase
  source 1..963: mol_type = other DNA
atgcaccatcatcaccatcacgggggctccggcatgagtgcactgatttgcggttctttagcgtatgataccatcatggtgtttccggaccagttcaagaaccatattctgcccgatcgtgttcaccgcctcaatgtcagctttcttgtaccacgcatgcgtcgtgaatttggaggctgtgccggcaacattgcgtacaatctgcatctgttgggtggtgctccgatcgtaatggctacggtgggccaagatttcggtccgtatcgcgagcacttcgaaactctgggcattgacttatcccgcgtcaagatcatcgatgatctgagtacaccgcaggccttcattaccaccgacatggatcataaccagattacggcgtttcatggcggcgcaatgatgcgttcgtacgaaaatcacgttcgtgatgtgccgggtgttaccttgggcctcgtaggtcctgatggacgcgagggcatgatccaaaatgccgaagaatttgctgctatgggcattccgttcatttttgacccaggtcaggcactgccgctgttcaacggccccgaactgcgcgagtttatcgaacaggcggactatgtggtggtcaacgattacgaaagcaatcttcttcaaacgcgtactggctggaacgagcaggacattgtttcacgcgtgcaggcgtatatcaccacgcaaggttcggctggagccctggtacatacaccggagaagacctacgatattccgccggctcacacccgtcgtgtcgttgatccaactggttgcggcgacgcgtttcgcgccggcctgatctatggtattcagcataattatgattggttgaccattggccgcatgggaaacttaatgggtgcgctgaaagtggaacaccctggcacccaaaatcagcgtttcgattttgccgaattcaacgaccagttcaaacaatattttggctacgcgctc

SEQ ID NO: 954 - protein, 321 aa, synthetic construct
  REGION 1..321: note = Variant of adenosine kinase
MHHHHHHGGSGMSALICGSLAYDTIMVFPDQFKNHILPDRVHRLNVSFLVPRMRREFGGCAGNIAYNLHLLGGAPIVMATVGQDFGPYREHFETLGIDLSRVKIIDDLSTPQAFITTDMDHNQITAFHGGAMMRSYENHVRDVPGVTLGLVGPDGREGMIQNAEEFAAMGIPFIFDPGQALPLFNGPELREFIEQADYVVVNDYESNLLQTRTGWNEQDIVSRVQAYITTQGSAGALVHTPEKTYDIPPAHTRRVVDPTGCGDAFRAGLIYGIQHNYDWLTIGRMGNLMGALKVEHPGTQNQRFDFAEFNDQFKQYFGYAL

SEQ ID NO: 955 - DNA, 963 bp, synthetic construct
  misc_feature 1..963: note = Variant of adenosine kinase
  source 1..963: mol_type = other DNA
atgcaccatcatcaccatcacgggggctccggcatgagtgcactgatttgcggttctttagcgtatgataccatcatggtgtttccggaccagttcaagaaccatattctgcccgatcgtgttcaccgcctcaatgtcagctttcttgtaccaggtatgcgtcgtgaatttggaggctgtgccggcaacattgcgtacaatctgcatctgttgggtggtgctccgatcgtaatggctacggtgggccaagatttcggtccgtatcgcgagcacttcgaaactctgggcattgacttatcccgcgtcaagatcatcgatgatctgagtacaccgcaggccttcattaccaccgacatggatcataaccagattacggcgtttcatggcggcgcaatgatgcgttcgtacgaaaatcacgttcgtgatgtgccgggtgttaccttgggcctcgtaggtcctgatggacgcgagggcatgatccaaaatgccgaagaatttgctgctggtggcattccgttcatttttgacccaggtcaggcactgccgctgttcaacggccccgaactgcgcgagtttatcgaacaggcggactatgtggtggtcaacgattacgaaagcaatcttcttcaaacgcgtactggctggaacgagcaggacattgtttcacgcgtgcaggcgtatatcaccacgcaaggttcggctggagccctggtacatacaccggagaagacctacgatattccgccggctcacacccgtcgtgtcgttgatccaactggttgcggcgacgcgtttcgcgccggcctgatctatggtattcagcataattatgattggttgaccattggccgcatgggaaacttaatgggtgcgctgaaagtggaacaccctggcacccaaaatcagcgtttcgattttgccgaattcaacgaccagttcaaacaatattttggctacgcgctc

SEQ ID NO: 956 - protein, 321 aa, synthetic construct
  REGION 1..321: note = Variant of adenosine kinase
MHHHHHHGGSGMSALICGSLAYDTIMVFPDQFKNHILPDRVHRLNVSFLVPGMRREFGGCAGNIAYNLHLLGGAPIVMATVGQDFGPYREHFETLGIDLSRVKIIDDLSTPQAFITTDMDHNQITAFHGGAMMRSYENHVRDVPGVTLGLVGPDGREGMIQNAEEFAAGGIPFIFDPGQALPLFNGPELREFIEQADYVVVNDYESNLLQTRTGWNEQDIVSRVQAYITTQGSAGALVHTPEKTYDIPPAHTRRVVDPTGCGDAFRAGLIYGIQHNYDWLTIGRMGNLMGALKVEHPGTQNQRFDFAEFNDQFKQYFGYAL

SEQ ID NO: 957 - DNA, 963 bp, synthetic construct
  misc_feature 1..963: note = Variant of adenosine kinase
  source 1..963: mol_type = other DNA
atgcaccatcatcaccatcacgggggctccggcatgagtgcactgatttgcggttctttagcgtatgataccatcatggtgtttccggaccagttcaagaaccatattctgcccgatcgtgttcaccgcctcaatgtcagctttcttgtaccacgcatgcgtcgtgaatttggaggctgtgccggcaacattgcgtacaatctgcatctgttgggtggtgctccgatcgtaatggctacggtgggccaagatttcttgccgtatcgcgagcacttcgaaactctgggcattgacttatcccgcgtcaagatcatcgatgatctgagtacaccgcaggccttcattaccaccgacatggatcataaccagattacggcgtttcatggcggcgcaatgatgcgttcgtacgaaaatcacgttcgtgatgtgccgggtgttaccttgggcctcgtaggtcctgatggacgcgagggcatgatccaaaatgccgaagaatttgctgctggtggcattccgttcatttttgacccaggtcaggcactgccgctgttcaacggccccgaactgcgcgagtttatcgaacaggcggactatgtggtggtcaacgattacgaaagcaatcttcttcaaacgcgtactggctggaacgagcaggacattgtttcacgcgtgcaggcgtatatcaccacgcaaggttcggctggagccctggtacatacaccggagaagacctacgatattccgccggctcacacccgtcgtgtcgttgatccaactggttgcggcgacgcgtttcgcgccggcctgatctatggtattcagcataattatgattggttgaccattggccgcatgggaaacttaatgggtgcgctgaaagtggaacaccctggcacccaaaatcagcgtttcgattttgccgaattcaacgaccagttcaaacaatattttggctacgcgctc

SEQ ID NO: 958 - protein, 321 aa, synthetic construct
  REGION 1..321: note = Variant of adenosine kinase
MHHHHHHGGSGMSALICGSLAYDTIMVFPDQFKNHILPDRVHRLNVSFLVPRMRREFGGCAGNIAYNLHLLGGAPIVMATVGQDFLPYREHFETLGIDLSRVKIIDDLSTPQAFITTDMDHNQITAFHGGAMMRSYENHVRDVPGVTLGLVGPDGREGMIQNAEEFAAGGIPFIFDPGQALPLFNGPELREFIEQADYVVVNDYESNLLQTRTGWNEQDIVSRVQAYITTQGSAGALVHTPEKTYDIPPAHTRRVVDPTGCGDAFRAGLIYGIQHNYDWLTIGRMGNLMGALKVEHPGTQNQRFDFAEFNDQFKQYFGYAL

SEQ ID NO: 959 - DNA, 963 bp, synthetic construct
  misc_feature 1..963: note = Variant of adenosine kinase
  source 1..963: mol_type = other DNA
atgcaccatcatcaccatcacgggggctccggcatgagtgcactgatttgcggttctttagcgtatgataccatcatggtgtttccggaccagttcaagaaccatattctgcccgatcgtgttcaccgcctcaatgtcagctttcttgtaccacgcatgcgtcgtgaatttggaggctgtgccggcaacattgcgtacaatctgcatctgttgggtggtgctccgatcgtaatggctacggtgggccaagatttcggtccgtatcgccttcacttcgaaactctgggcattgacttatcccgcgtcaagatcatcgatgatctgagtacaccgcaggccttcattaccaccgacatggatcataaccagattacggcgtttcatggcggcgcaatgatgcgttcgtacgaaaatcacgttcgtgatgtgccgggtgttaccttgggcctcgtaggtcctgatggacgcgagggcatgatccaaaatgccgaagaatttgctgctggtggcattccgttcatttttgacccaggtcaggcactgccgctgttcaacggccccgaactgcgcgagtttatcgaacaggcggactatgtggtggtcaacgattacgaaagcaatcttcttcaaacgcgtactggctggaacgagcaggacattgtttcacgcgtgcaggcgtatatcaccacgcaaggttcggctggagccctggtacatacaccggagaagacctacgatattccgccggctcacacccgtcgtgtcgttgatccaactggttgcggcgacgcgtttcgcgccggcctgatctatggtattcagcataattatgattggttgaccattggccgcatgggaaacttaatgggtgcgctgaaagtggaacaccctggcacccaaaatcagcgtttcgattttgccgaattcaacgaccagttcaaacaatattttggctacgcgctc

SEQ ID NO: 960 - protein, 321 aa, synthetic construct
  REGION 1..321: note = Variant of adenosine kinase
MHHHHHHGGSGMSALICGSLAYDTIMVFPDQFKNHILPDRVHRLNVSFLVPRMRREFGGCAGNIAYNLHLLGGAPIVMATVGQDFGPYRLHFETLGIDLSRVKIIDDLSTPQAFITTDMDHNQITAFHGGAMMRSYENHVRDVPGVTLGLVGPDGREGMIQNAEEFAAGGIPFIFDPGQALPLFNGPELREFIEQADYVVVNDYESNLLQTRTGWNEQDIVSRVQAYITTQGSAGALVHTPEKTYDIPPAHTRRVVDPTGCGDAFRAGLIYGIQHNYDWLTIGRMGNLMGALKVEHPGTQNQRFDFAEFNDQFKQYFGYAL

SEQ ID NO: 961 - DNA, 963 bp, synthetic construct
  misc_feature 1..963: note = Variant of adenosine kinase
  source 1..963: mol_type = other DNA
atgcaccatcatcaccatcacgggggctccggcatgagtgcactgatttgcggttctttagcgtatgataccatcatggtgtttccggaccagttcaagaaccatattctgcccgatcgtgttcaccgcctcaatgtcagctttcttgtaccacgcatgcgtcgtgaatttggaggctgtgccggcaacattgcgtacaatctgcatctgttgggtggtgctccgatcgtaatggctacggtgggccaagatttcggtccgtatcgcgagcacttcgaaactctgggcattgacttatcccgcgtcaagatcatcgatgatctgagtacaccgcaggccttcattaccaccgacatggatcataaccagattacggcgtttcatggcggcgcaatgatgcgttcgtacgaaaatcacgttcgtgatgtgccgggtgttaccttgggcctcgtaggtcctgatggacgcgagggcatgatccaaaatgccgaagaatttgctgctggtggcattccgttcatttttgacccaggtcaggcactgccgctgttcaacggccccgaactgcgcgagtttatcgaacaggcggactatgtggtggtcaacgattacgaaagcaatcttcttcaaacgcgtactggctggaacgagcaggacattgtttcacgcgtgcaggcgtatatcaccacgcaaggttcggctggagccctggtacatacaccggagaagacctacgatattccgccggctcacacccgtcgtgtcgttgatccaactggttgcggcgacgcgtttcgcgccggcctgatctatggtattcagcataattatgattggttgaccattggccgcatgggaaacttaatgggtgcgctgaaagtggaacaccctggcacccaaaatcagcgtttcgattttgccgaattcaacggtcagttcaaacaatattttggctacgcgctc

SEQ ID NO: 962 - protein, 321 aa, synthetic construct
  REGION 1..321: note = Variant of adenosine kinase
MHHHHHHGGSGMSALICGSLAYDTIMVFPDQFKNHILPDRVHRLNVSFLVPRMRREFGGCAGNIAYNLHLLGGAPIVMATVGQDFGPYREHFETLGIDLSRVKIIDDLSTPQAFITTDMDHNQITAFHGGAMMRSYENHVRDVPGVTLGLVGPDGREGMIQNAEEFAAGGIPFIFDPGQALPLFNGPELREFIEQADYVVVNDYESNLLQTRTGWNEQDIVSRVQAYITTQGSAGALVHTPEKTYDIPPAHTRRVVDPTGCGDAFRAGLIYGIQHNYDWLTIGRMGNLMGALKVEHPGTQNQRFDFAEFNGQFKQYFGYAL

SEQ ID NO: 963 - DNA, 963 bp, synthetic construct
  misc_feature 1..963: note = Variant of adenosine kinase
  source 1..963: mol_type = other DNA
atgcaccatcatcaccatcacgggggctccggcatgagtgcactgatttgcggttctttagcgtatgataccatcatggtgtttccggaccagttcaagaaccatattctgcccgatcgtgttcaccgcctcaatgtcagctttcttgtaccacgcatgcgtcgtgaatttggaggctgtgccggcaacattgcgtacaatctgcatctgttgggtggtgctccgatcgtaatggctacggtgggccaagatttcggtccgtatcgcgagcacttcgaaactctgggcattgacttatcccgcgtcaagatcatcgatgatctgagtacaccgcaggccttcattaccaccgacatggatcataaccagattacggcgtttcatggcggcgcaatgatgcgttcgtacgaaaatcacgttcgtgatgtgccgggtgttaccttgggcctcgtaggtcctgatggacgcgagggcatgatccaaaatgcctgggaatttgctgctggtggcattccgttcatttttgacccaggtcaggcactgccgctgttcaacggccccgaactgcgcgagtttatcgaacaggcggactatgtggtggtcaacgattacgaaagcaatcttcttcaaacgcgtactggctggaacgagcaggacattgtttcacgcgtgcaggcgtatatcaccacgcaaggttcggctggagccctggtacatacaccggagaagacctacgatattccgccggctcacacccgtcgtgtcgttgatccaactggttgcggcgacgcgtttcgcgccggcctgatctatggtattcagcataattatgattggttgaccattggccgcatgggaaacttaatgggtgcgctgaaagtggaacaccctggcacccaaaatcagcgtttcgattttgccgaattcaacgaccagttcaaacaatattttggctacgcgctc

SEQ ID NO: 964 - protein, 321 aa, synthetic construct
  REGION 1..321: note = Variant of adenosine kinase
MHHHHHHGGSGMSALICGSLAYDTIMVFPDQFKNHILPDRVHRLNVSFLVPRMRREFGGCAGNIAYNLHLLGGAPIVMATVGQDFGPYREHFETLGIDLSRVKIIDDLSTPQAFITTDMDHNQITAFHGGAMMRSYENHVRDVPGVTLGLVGPDGREGMIQNAWEFAAGGIPFIFDPGQALPLFNGPELREFIEQADYVVVNDYESNLLQTRTGWNEQDIVSRVQAYITTQGSAGALVHTPEKTYDIPPAHTRRVVDPTGCGDAFRAGLIYGIQHNYDWLTIGRMGNLMGALKVEHPGTQNQRFDFAEFNDQFKQYFGYAL

SEQ ID NO: 965 - DNA, 963 bp, synthetic construct
  misc_feature 1..963: note = Variant of adenosine kinase
  source 1..963: mol_type = other DNA
atgcaccatcatcaccatcacgggggctccggcatgagtgcactgatttgcggttctttagcgtatgataccatcatggtgtttccggaccagttcaagaaccatattctgcccgatcgtgttcaccgcctcaatgtcagctttcttgtaccacgcatgcgtcgtgaatttggaggctgtgccggcaacattgcgtacaatctgcatctgttgggtggtgctccgatcgtaatggctacggtgggccaagatttcggtccgtatcgcgagcacttcgaaactctgggcattgacttatcccgcgtcaagatcatcgatgatctgagtacaccgcaggccttcattaccaccgacatggatcataaccagattacggcgtttcatggcggcgcaatgatgcgttcgtacgaaaatcacgttcgtgatgtgccgggtgttaccttgggcctcgtaggtcctgatggacgcgagggcatgatccaaaatgccgaagaatttgctgctggtggcattccgttcatttttgacccaggtcaggcactgccgctgttcaacggccccgaactgcgcgagtttatcgaacaggcggactatgtggtggtcaacgattacgaaagcaatcttcttcaaacgcgtactggctggaacgagcaggacattgtttcacgcgtgcaggcgtatatcaccacgcaaggttcggctggagccctggtacatacaccggagaagacctacgatattccgccggctcacacccgtcgtgtcgttgatccaactggttgcggcgacgcgtttcgcgccggcctgatctatggtattcagcataattatgattggttgaccattggccgcatgggaaacttaatgggtgcgctgaaagtggaacaccctggcacccaaaatcagcgtttcgattttgccgaattctgtgaccagttcaaacaatattttggctacgcgctc

SEQ ID NO: 966 - protein, 321 aa, synthetic construct
  REGION 1..321: note = Variant of adenosine kinase
MHHHHHHGGSGMSALICGSLAYDTIMVFPDQFKNHILPDRVHRLNVSFLVPRMRREFGGCAGNIAYNLHLLGGAPIVMATVGQDFGPYREHFETLGIDLSRVKIIDDLSTPQAFITTDMDHNQITAFHGGAMMRSYENHVRDVPGVTLGLVGPDGREGMIQNAEEFAAGGIPFIFDPGQALPLFNGPELREFIEQADYVVVNDYESNLLQTRTGWNEQDIVSRVQAYITTQGSAGALVHTPEKTYDIPPAHTRRVVDPTGCGDAFRAGLIYGIQHNYDWLTIGRMGNLMGALKVEHPGTQNQRFDFAEFCDQFKQYFGYAL

SEQ ID NO: 967 - DNA, 963 bp, synthetic construct
  misc_feature 1..963: note = Variant of adenosine kinase
  source 1..963: mol_type = other DNA
atgcaccatcatcaccatcacgggggctccggcatgagtgcactgatttgcggttctttagcgtatgataccatcatggtgtttccggaccagttcaagaaccatattctgcccgatcgtgttcaccgcctcaatgtcagctttcttgtaccacgcatgcgtcgtgaatttggaggctgtgccggcaacattgcgtacaatctgcatctgttgggtggtgctccgatcgtaatggctacggtgggccaagatttcggtccgtatcgcgagcacttcgaaactctgggcattgacttatcccgcgtcaagatcatcgatgatctgagtacaccgcaggccttcattaccaccgacatggatcataaccagattacggcgtttcatggcggcgcaatgatgcgttcgtacgaaaatcacgttcgtgatgtgccgggtgttaccttgggcctcgtaggtcctgatggacgcgagggcatgatccaaaatgccgaagaattttttgctggtggcattccgttcatttttgacccaggtcaggcactgccgctgttcaacggccccgaactgcgcgagtttatcgaacaggcggactatgtggtggtcaacgattacgaaagcaatcttcttcaaacgcgtactggctggaacgagcaggacattgtttcacgcgtgcaggcgtatatcaccacgcaaggttcggctggagccctggtacatacaccggagaagacctacgatattccgccggctcacacccgtcgtgtcgttgatccaactggttgcggcgacgcgtttcgcgccggcctgatctatggtattcagcataattatgattggttgaccattggccgcatgggaaacttaatgggtgcgctgaaagtggaacaccctggcacccaaaatcagcgtttcgattttgccgaattcaacgaccagttcaaacaatattttggctacgcgctc

SEQ ID NO: 968 - protein, 321 aa, synthetic construct
  REGION 1..321: note = Variant of adenosine kinase
MHHHHHHGGSGMSALICGSLAYDTIMVFPDQFKNHILPDRVHRLNVSFLVPRMRREFGGCAGNIAYNLHLLGGAPIVMATVGQDFGPYREHFETLGIDLSRVKIIDDLSTPQAFITTDMDHNQITAFHGGAMMRSYENHVRDVPGVTLGLVGPDGREGMIQNAEEFFAGGIPFIFDPGQALPLFNGPELREFIEQADYVVVNDYESNLLQTRTGWNEQDIVSRVQAYITTQGSAGALVHTPEKTYDIPPAHTRRVVDPTGCGDAFRAGLIYGIQHNYDWLTIGRMGNLMGALKVEHPGTQNQRFDFAEFNDQFKQYFGYAL

SEQ ID NO: 969 - DNA, 963 bp, synthetic construct
  misc_feature 1..963: note = Variant of adenosine kinase
  source 1..963: mol_type = other DNA
atgcaccatcatcaccatcacgggggctccggcatgagtgcactgatttgcggttctttagcgtatgataccatcatggtgtttccggaccagttcaagaaccatattctgcccgatcgtgttcaccgcctcaatgtcagctttcttgtaccacgcatgcgtcgtgaatttggaggctgtgccggcaacattgcgtacaatctgcatctgttgggtggtgctccgatcgtaatggctacggtgggccaagatttcggtccgtatcgcgagcacttcgaaactctgggcattgacttatcccgcgtcaagatcatcgatgatctgagtacaccgcaggccttcattaccaccgacatggatcataaccagattacggcgtttcatggcggcgcaatgatgcgttcgtacgaaaatcacgttcgtgatgtgccgggtgttaccttgggcctcgtaggtcctgatggacgcgagggcatgatccaaaatgccgaagaatttgctgctggtggcattccgttcatttttgacccaggtcaggcactgccgctgttcaacggccccgaactgcgcgagtttatcgaacaggcggactatgtggtggtcaacgattacgaaagcaatcttcttcaaacgcgtactggctggaacgagcaggacattgtttcacgcgtgcaggcgtatatcaccacgcaaggttcggctggagccctggtacatacaccggagaagacctacgatattccgccggctcacacccgtcgtgtcgttgatccaactggttgcggcgacgcgtttcgcgccggcctgatctatggtattcagcatgagtatgattggttgaccattggccgcatgggaaacttaatgggtgcgctgaaagtggaacaccctggcacccaaaatcagcgtttcgattttgccgaattcaacgaccagttcaaacaatattttggctacgcgctc

SEQ ID NO: 970 - protein, 321 aa, synthetic construct
  REGION 1..321: note = Variant of adenosine kinase
MHHHHHHGGSGMSALICGSLAYDTIMVFPDQFKNHILPDRVHRLNVSFLVPRMRREFGGCAGNIAYNLHLLGGAPIVMATVGQDFGPYREHFETLGIDLSRVKIIDDLSTPQAFITTDMDHNQITAFHGGAMMRSYENHVRDVPGVTLGLVGPDGREGMIQNAEEFAAGGIPFIFDPGQALPLFNGPELREFIEQADYVVVNDYESNLLQTRTGWNEQDIVSRVQAYITTQGSAGALVHTPEKTYDIPPAHTRRVVDPTGCGDAFRAGLIYGIQHEYDWLTIGRMGNLMGALKVEHPGTQNQRFDFAEFNDQFKQYFGYAL

SEQ ID NO: 971 - DNA, 963 bp, synthetic construct
  misc_feature 1..963: note = Variant of adenosine kinase
  source 1..963: mol_type = other DNA
atgcaccatcatcaccatcacgggggctccggcatgagtgcactgatttgcggttctttagcgtatgataccatcatggtgtttccggaccagttcaagaacgttattctgcccgatcgtgttcaccgcctcaatgtcagctttcttgtaccacgcatgcgtcgtgaatttggaggctgtgccggcaacattgcgtacaatctgcatctgttgggtggtgctccgatcgtaatggctacggtgggccaagatttcggtccgtatcgcgagcacttcgaaactctgggcattgacttatcccgcgtcaagatcatcgatgatctgagtacaccgcaggccttcattaccaccgacatggatcataaccagattacggcgtttcatggcggcgcaatgatgcgttcgtacgaaaatcacgttcgtgatgtgccgggtgttaccttgggcctcgtaggtcctgatggacgcgagggcatgatccaaaatgccgaagaatttgctgctggtggcattccgttcatttttgacccaggtcaggcactgccgctgttcaacggccccgaactgcgcgagtttatcgaacaggcggactatgtggtggtcaacgattacgaaagcaatcttcttcaaacgcgtactggctggaacgagcaggacattgtttcacgcgtgcaggcgtatatcaccacgcaaggttcggctggagccctggtacatacaccggagaagacctacgatattccgccggctcacacccgtcgtgtcgttgatccaactggttgcggcgacgcgtttcgcgccggcctgatctatggtattcagcataattatgattggttgaccattggccgcatgggaaacttaatgggtgcgctgaaagtggaacaccctggcacccaaaatcagcgtttcgattttgccgaattcaacgaccagttcaaacaatattttggctacgcgctc

SEQ ID NO: 972 - protein, 321 aa, synthetic construct
  REGION 1..321: note = Variant of adenosine kinase
MHHHHHHGGSGMSALICGSLAYDTIMVFPDQFKNVILPDRVHRLNVSFLVPRMRREFGGCAGNIAYNLHLLGGAPIVMATVGQDFGPYREHFETLGIDLSRVKIIDDLSTPQAFITTDMDHNQITAFHGGAMMRSYENHVRDVPGVTLGLVGPDGREGMIQNAEEFAAGGIPFIFDPGQALPLFNGPELREFIEQADYVVVNDYESNLLQTRTGWNEQDIVSRVQAYITTQGSAGALVHTPEKTYDIPPAHTRRVVDPTGCGDAFRAGLIYGIQHNYDWLTIGRMGNLMGALKVEHPGTQNQRFDFAEFNDQFKQYFGYAL

SEQ ID NO: 973 - DNA, 963 bp, synthetic construct
  misc_feature 1..963: note = Variant of adenosine kinase
  source 1..963: mol_type = other DNA
atgcaccatcatcaccatcacgggggctccggcatgagtgcactgatttgcggttctttagcgtatgataccatcatggtgtttccggaccagttcaagaaccatattctgcccgatcgtgttcaccgcctcaatgtcagctttcttgtaccacgcatgcgtcgtgggtttggaggctgtgccggcaacattgcgtacaatctgcatctgttgggtggtgctccgatcgtaatggctacggtgggccaagatttcggtccgtatcgcgagcacttcgaaactctgggcattgacttatcccgcgtcaagatcatcgatgatctgagtacaccgcaggccttcattaccaccgacatggatcataaccagattacggcgtttcatggcggcgcaatgatgcattcgtacgaaaatcacgttcgtgatgtgccgggtgttaccttgggcctcgtaggtcctgatggacgcgagggcatgatccaaaatgccgaagaatttgctgctggtggcattccgttcatttttgacccaggtcaggcactgccgctgttcaacggccccgaactgcgcgagtttatcgaacaggcggactatgtggtggtcaacgattacgaaagcaatcttcttcaaacgcgtactggctggaacgagcaggacattgtttcacgcgtgcaggcgtatatcacgacgcaaggttcggctggagccctggtacatacaccggagaagacctacgatattccgccggctcacacccgtcgtgtcgttgatccaactggttgcggcgacgcgtttcgcgccggcctgatctatggtattcagcataattatgattggttgaccattggccgcatgggaaacttaatgggtgcgctgaaagtggaacaccctggcacccaaaatcagcgtttcgattttgccgaattcaacgaccagttcaaacaatattttggctacgcgctc

SEQ ID NO: 974 - protein, 321 aa, synthetic construct
  REGION 1..321: note = Variant of adenosine kinase
MHHHHHHGGSGMSALICGSLAYDTIMVFPDQFKNHILPDRVHRLNVSFLVPRMRRGFGGCAGNIAYNLHLLGGAPIVMATVGQDFGPYREHFETLGIDLSRVKIIDDLSTPQAFITTDMDHNQITAFHGGAMMHSYENHVRDVPGVTLGLVGPDGREGMIQNAEEFAAGGIPFIFDPGQALPLFNGPELREFIEQADYVVVNDYESNLLQTRTGWNEQDIVSRVQAYITTQGSAGALVHTPEKTYDIPPAHTRRVVDPTGCGDAFRAGLIYGIQHNYDWLTIGRMGNLMGALKVEHPGTQNQRFDFAEFNDQFKQYFGYAL

SEQ ID NO: 975 - DNA, 963 bp, synthetic construct
  misc_feature 1..963: note = Variant of adenosine kinase
  source 1..963: mol_type = other DNA
atgcaccatcatcaccatcacgggggctccggcatgagtgcactgatttgcggttctttagcgtatgataccatcatggtgtttccggaccagttcaagaaccatattctgcccgatcgtgttcaccgcctcaatgtcagctttcttgtaccacgcatgcgtcgtgaatttggaggctgtgccggcaacattgcgtacaatctgcatctgttgggtggtgctccgatcgtaatggctacggtgggccaagatttcggtccgtatcgcgagcacttcgaaactctgggcattgacttatcccgcgtcaagatcatcgatgatctgagtacaccgcaggccttcattaccaccgacatggatcataaccagattacggcgtttcatggcggcgcaatgatgcgttcgtacgaaaatcacgttcgtgatgtgccgggtgttaccttgggcctcgtaggtcctgatggacgcgagggcatgatccaaaatgccgaagaatttgctgctggtggcattccgttcatttttgacccaggtcaggcactgccgctgttcaacggccccgaactgcgcgagtttatcgaacaggcggactatgtggtggtcaacgattacgaaagcaatcttcttcaaatgcgtactggctggaacgagcaggacattgtttcacgcgtgcaggcgtatatcaccacgcaaggttcggctggagccctggtacatacaccggagaagacctacgatattccgccggctcacacccgtcgtgtcgttgatccaactggttgcggcgacgcgtttcgcgccggcctgatctatggtattcagcataattatgattggttgaccattggccgcatgggaaacttaatgggtgcgctgaaagtggaacaccctggcacccaaaatcagcgtttcgattttgccgaattcaacgaccagttcaaacaatattttggctacgcgctc

SEQ ID NO: 976 - protein, 321 aa, synthetic construct
  REGION 1..321: note = Variant of adenosine kinase
MHHHHHHGGSGMSALICGSLAYDTIMVFPDQFKNHILPDRVHRLNVSFLVPRMRREFGGCAGNIAYNLHLLGGAPIVMATVGQDFGPYREHFETLGIDLSRVKIIDDLSTPQAFITTDMDHNQITAFHGGAMMRSYENHVRDVPGVTLGLVGPDGREGMIQNAEEFAAGGIPFIFDPGQALPLFNGPELREFIEQADYVVVNDYESNLLQMRTGWNEQDIVSRVQAYITTQGSAGALVHTPEKTYDIPPAHTRRVVDPTGCGDAFRAGLIYGIQHNYDWLTIGRMGNLMGALKVEHPGTQNQRFDFAEFNDQFKQYFGYAL

SEQ ID NO: 977 - DNA, 963 bp, synthetic construct
  misc_feature 1..963: note = Variant of adenosine kinase
  source 1..963: mol_type = other DNA
atgcaccatcatcaccatcacgggggctccggcatgagtgcactgatttgcggttctttagcgtatgataccatcatggtgtttccggaccagttcaagaaccatattctgcccgatcgtgttcaccgcctcaatgtcagctttcttgtaccacgcatgcgtcgtgaatttggaggctgtgccggcaacattgcgtacaatctgcatctgttgggtggtgctccgatcgtaatggctacggtgggccaagatttcggtccgtatcgcgagcacttcgaaactctgggcattgacttatcccgcgtcaagatcatcgatgatctgagtacaccgcaggccttcattaccaccgacatggatcataaccagattacggcgtttcatggcggcgcaatgatgcgttcgtacgaaaatcacgttcgtgatgtgccgggtgttaccttgggcctcgtaggtcctgatggacgcgagggcatgatccaaaatgccgaagaatttgctgctggtgtgattccgttcatttttgacccaggtcaggcactgccgctgttcaacggccccgaactgcgcgagtttatcgaacaggcggactatgtggtggtcaacgattacgaaagcaatcttcttcaaacgcgtactggctggaacgagcaggacattgtttcacgcgtgcaggcgtatatcaccacgcaaggttcggctggagccctggtacatacaccggagaagacctacgatattccgccggctcacacccgtcgtgtcgttgatccaactggttgcggcgacgcgtttcgcgccggcctgatctatggtattcagcataattatgattggttgaccattggccgcatgggaaacttaatgggtgcgctgaaagtggaacaccctggcacccaaaatcagcgtttcgattttgccgaattcaacgaccagttcaaacaatattttggctacgcgctc

SEQ ID NO: 978 - protein, 321 aa, synthetic construct
  REGION 1..321: note = Variant of adenosine kinase
MHHHHHHGGSGMSALICGSLAYDTIMVFPDQFKNHILPDRVHRLNVSFLVPRMRREFGGCAGNIAYNLHLLGGAPIVMATVGQDFGPYREHFETLGIDLSRVKIIDDLSTPQAFITTDMDHNQITAFHGGAMMRSYENHVRDVPGVTLGLVGPDGREGMIQNAEEFAAGVIPFIFDPGQALPLFNGPELREFIEQADYVVVNDYESNLLQTRTGWNEQDIVSRVQAYITTQGSAGALVHTPEKTYDIPPAHTRRVVDPTGCGDAFRAGLIYGIQHNYDWLTIGRMGNLMGALKVEHPGTQNQRFDFAEFNDQFKQYFGYAL

SEQ ID NO: 979 - DNA, 963 bp, synthetic construct
  misc_feature 1..963: note = Variant of adenosine kinase
  source 1..963: mol_type = other DNA
atgcaccatcatcaccatcacgggggctccggcatgagtgcactgatttgcggttctttagcgtatgataccatcatggtgtttccggaccagttcaagaaccatattctgcccgatcgtgttcaccgcctcaatgtcagctttctttgtccacgcatgcgtcgtgaatttggaggctgtgccggcaacattgcgtacaatctgcatctgttgggtggtgctccgatcgtaatggctacggtgggccaagatttcggtccgtatcgcgagcacttcgaaactctgggcattgacttatcccgcgtcaagatcatcgatgatctgagtacaccgcaggccttcattaccaccgacatggatcataaccagattacggcgtttcatggcggcgcaatgatgcgttcgtacgaaaatcacgttcgtgatgtgccgggtgttaccttgggcctcgtaggtcctgatggacgcgagggcatgatccaaaatgccgaagaatttgctgctggtggcattccgttcatttttgacccaggtcaggcactgccgctgttcaacggccccgaactgcgcgagtttatcgaacaggcggactatgtggtggtcaacgattacgaaagcaatcttcttcaaacgcgtactggctggaacgagcaggacattgtttcacgcgtgcaggcgtatatcaccacgcaaggttcggctggagccctggtacatacaccggagaagacctacgatattccgccggctcacacccgtcgtgtcgttgatccaactggttgcggcgacgcgtttcgcgccggcctgatctatggtattcagcataattatgattggttgaccattggccgcatgggaaacttaatgggtgcgctgaaagtggaacaccctggcacccaaaatcagcgtttcgattttgccgaattcaacgaccagttcaaacaatattttggctacgcgctc

SEQ ID NO: 980 - protein, 321 aa, synthetic construct
  REGION 1..321: note = Variant of adenosine kinase
MHHHHHHGGSGMSALICGSLAYDTIMVFPDQFKNHILPDRVHRLNVSFLCPRMRREFGGCAGNIAYNLHLLGGAPIVMATVGQDFGPYREHFETLGIDLSRVKIIDDLSTPQAFITTDMDHNQITAFHGGAMMRSYENHVRDVPGVTLGLVGPDGREGMIQNAEEFAAGGIPFIFDPGQALPLFNGPELREFIEQADYVVVNDYESNLLQTRTGWNEQDIVSRVQAYITTQGSAGALVHTPEKTYDIPPAHTRRVVDPTGCGDAFRAGLIYGIQHNYDWLTIGRMGNLMGALKVEHPGTQNQRFDFAEFNDQFKQYFGYAL

SEQ ID NO: 981 - DNA, 963 bp, synthetic construct
  misc_feature 1..963: note = Variant of adenosine kinase
  source 1..963: mol_type = other DNA
atgcaccatcatcaccatcacgggggctccggcatgagtgcactgatttgcggttctttagcgtatgataccatcatggtgtttccggaccagttcaagaaccatattctgcccgatcgtttgcaccgcctcaatgtcagctttcttgtaccacgcatgcgtcgtgaatttggaggctgtgccggcaacattgcgtacaatctgcatctgttgggtggtgctccgatcgtaatggctacggtgggccaagatttcggtccgtatcgcgagcacttcgaaactctgggcattgacttatcccgcgtcaagatcatcgatgatctgagtacaccgcaggccttcattaccaccgacatggatcataaccagattacggcgtttcatggcggcgcaatgatgcgttcgtacgaaaatcacgttcgtgatgtgccgggtgttaccttgggcctcgtaggtcctgatggacgcgagggcatgatccaaaatgccgaagaatttgctgctggtggcattccgttcatttttgacccaggtcaggcactgccgctgttcaacggccccgaactgcgcgagtttatcgaacaggcggactatgtggtggtcaacgattacgaaagcaatcttcttcaaacgcgtactggctggaacgagcaggacattgtttcacgcgtgcaggcgtatatcaccacgcaaggttcggctggagccctggtacatacaccggagaagacctacgatattccgccggctcacacccgtcgtgtcgttgatccaactggttgcggcgacgcgtttcgcgccggcctgatctatggtattcagcataattatgattggttgaccattggccgcatgggaaacttaatgggtgcgctgaaagtggaacaccctggcacccaaaatcagcgtttcgattttgccgaattcaacgaccagttcaaacaatattttggctacgcgctc

SEQ ID NO: 982 - protein, 321 aa, synthetic construct
  REGION 1..321: note = Variant of adenosine kinase
MHHHHHHGGSGMSALICGSLAYDTIMVFPDQFKNHILPDRLHRLNVSFLVPRMRREFGGCAGNIAYNLHLLGGAPIVMATVGQDFGPYREHFETLGIDLSRVKIIDDLSTPQAFITTDMDHNQITAFHGGAMMRSYENHVRDVPGVTLGLVGPDGREGMIQNAEEFAAGGIPFIFDPGQALPLFNGPELREFIEQADYVVVNDYESNLLQTRTGWNEQDIVSRVQAYITTQGSAGALVHTPEKTYDIPPAHTRRVVDPTGCGDAFRAGLIYGIQHNYDWLTIGRMGNLMGALKVEHPGTQNQRFDFAEFNDQFKQYFGYAL

SEQ ID NO: 983 - DNA, 963 bp, synthetic construct
  misc_feature 1..963: note = Variant of adenosine kinase
  source 1..963: mol_type = other DNA
atgcaccatcatcaccatcacgggggctccggcatgagtgcactgatttgcggttctttagcgtatgataccatcatggtgtttccggaccagttcaagaaccatattctgcccgatcgtgttcaccgcctcaatgtcagctttcttgtaccacgcatgcgtcgtgaatttggaggctgtgccggcaacattgcgtacaatctgcatctgttgggtggtgctccgatcgtaatggctacggtgggccaagatttcggtccgtatcgcgagcacttcgaaactctgggcattgacttatcccgcgtcaagatcatcgatgatctgagtacaccgcaggccttcattaccaccgacatggatcataaccagattacggcgtttcatggcggcgcaatgatgcgttcgtacgaaaatcacgttcgtgatgtgccgggtgttaccttgggcctcgtaggtcctgatggacgcgagggcatgatccaaaatgccgaagaatttgctgctggtggcattccgttcatttttgacccaggtcaggcactgccgctgttcaacggccccgaactgcgcgagtttatcgaacaggcggactatgtggtggtcaacgattacgaaagcaatcttcttcaaacgcgtactggctggaacgagcaggacattgtttcacgcgtgcaggcgtatatcaccacgcaaggttcggctggagccctggtacatacaccggagaagacctacgatattccgccggctcacacccgtcgtgtcgttgatccaactggttgcggcgacgcgtttcgcgccggcctgatctatggtattcagcataattatgattggttgaccattggccgcatgggaaacttaatgggtgcgctgaaagtggaacaccctggcacccaaaatcagcgtttcgattttgccgaattcaactcgcagttcaaacaatattttggctacgcgctc

SEQ ID NO: 984 - protein, 321 aa, synthetic construct
  REGION 1..321: note = Variant of adenosine kinase
MHHHHHHGGSGMSALICGSLAYDTIMVFPDQFKNHILPDRVHRLNVSFLVPRMRREFGGCAGNIAYNLHLLGGAPIVMATVGQDFGPYREHFETLGIDLSRVKIIDDLSTPQAFITTDMDHNQITAFHGGAMMRSYENHVRDVPGVTLGLVGPDGREGMIQNAEEFAAGGIPFIFDPGQALPLFNGPELREFIEQADYVVVNDYESNLLQTRTGWNEQDIVSRVQAYITTQGSAGALVHTPEKTYDIPPAHTRRVVDPTGCGDAFRAGLIYGIQHNYDWLTIGRMGNLMGALKVEHPGTQNQRFDFAEFNSQFKQYFGYAL

SEQ ID NO: 985 - DNA, 963 bp, synthetic construct
  misc_feature 1..963: note = Variant of adenosine kinase
  source 1..963: mol_type = other DNA
atgcaccatcatcaccatcacgggggctccggcatgagtgcactgatttgcggttctttagcgtatgataccatcatggtgtttccggaccagttcaagaaccatattctgcccgatcgtgttcaccgcctcaatgtcagctttcttgtaccacgcatgcgtcgtgagtttggaggctgtgccggcaacattgcgtacaatctgcatctgttgggtggtgctccgatcgtaatggctacggtgggccaagatttcggtccgtatcgcgagcacttcgaaactctgggcattgacttatcccgcgtcaagatcatcgatgatctgagtacaccgcaggccttcattaccaccgacatggatctgaaccagattacggcgtttcatggcggcgcaatgatgcgttcgtacgaaaatcacgttcgtgatgtgccgggtgttaccttgggcctcgtaggtcctgatggacgcgagggcatgatccaaaatgccgaagaatttgctgctgatggcattccgttcatttttgacccaggtcaggcactgccgctgttcaacggccccgaactgcgcgagtttatcgaacaggcggactatgtggtggtcaacgattacgaaagcaatcttcttcaaacgcgtactggctggaacgagcaggacattgtttcacgcgtgcaggcgtatatcgttacgcaaggttcggctggagccctggtacatacaccggagaagacctacgatattccgccggctcacacccgtcgtgtagttgatccaactggttgcggcgacgcgtttcgcgccggcctgatctatggtattcagcataattatgattggttgaccattggccgcatgggaaacttaatgggtgcgctgaaagtggaacaccctggcacccaaaatcagcgtttcgattttgccgaattcaacgaccagttcaaacaatattttggctacgcgctc

SEQ ID NO: 986 - protein, 321 aa, synthetic construct
  REGION 1..321: note = Variant of adenosine kinase
MHHHHHHGGSGMSALICGSLAYDTIMVFPDQFKNHILPDRVHRLNVSFLVPRMRREFGGCAGNIAYNLHLLGGAPIVMATVGQDFGPYREHFETLGIDLSRVKIIDDLSTPQAFITTDMDLNQITAFHGGAMMRSYENHVRDVPGVTLGLVGPDGREGMIQNAEEFAADGIPFIFDPGQALPLFNGPELREFIEQADYVVVNDYESNLLQTRTGWNEQDIVSRVQAYIVTQGSAGALVHTPEKTYDIPPAHTRRVVDPTGCGDAFRAGLIYGIQHNYDWLTIGRMGNLMGALKVEHPGTQNQRFDFAEFNDQFKQYFGYAL

SEQ ID NO: 987 - DNA, 963 bp, synthetic construct
  misc_feature 1..963: note = Variant of adenosine kinase
  source 1..963: mol_type = other DNA
atgcaccatcatcaccatcacgggggctccggcatgagtgcactgatttgcggttctttagcgtatgataccatcatggtgtttccggaccagttcaagaaccatattctgcccgatcgtgttcaccgcctcaatgtcagctttcttgtaccacgcatgcgtcgtgaatttggaggctgtgccggcaacattgcgtacaatctgcatctgttgggtggtattccgatcgtaatggctacggtgggccaagatttcggtccgtatcgcgagcacttcgaaactctgggcattgacttatcccgcgtcaagatcatcgatgatctgagtacaccgcaggccttcattaccaccgacatggatcataaccagattacggcgtttcatggcggcgcaatgatgcgttcgtacgaaaatcacgttcgtgatgtgccgggtgttaccttgggcctcgtaggtcctgatggacgcgagggcatgatccaaaatgccgaagaatttgctgctggtggcattccgttcatttttgacccaggtcaggcactgccgctgttcaacggccccgaactgcgcgagtttatcgaacaggcggactatgtggtggtcaacgattacgaaagcaatcttcttcaaacgcgtactggctggaacgagcaggacattgtttcacgcgtgcaggcgtatatcaccacgcaaggttcggctggagccctggtacatacaccggagaagacctacgatattccgccggctcacacccgtcgtgtcgttgatccaactggttgcggcgacgcgtttcgcgccggcctgatctatggtattcagcataattatgattggttgaccattggccgcatgggaaacttaatgggtgcgctgaaagtggaacaccctggcacccaaaatcagcgtttcgattttgccgaattcaacgaccagttcaaacaatattttggctacgcgctc

SEQ ID NO: 988 - protein, 321 aa, synthetic construct
  REGION 1..321: note = Variant of adenosine kinase
MHHHHHHGGSGMSALICGSLAYDTIMVFPDQFKNHILPDRVHRLNVSFLVPRMRREFGGCAGNIAYNLHLLGGIPIVMATVGQDFGPYREHFETLGIDLSRVKIIDDLSTPQAFITTDMDHNQITAFHGGAMMRSYENHVRDVPGVTLGLVGPDGREGMIQNAEEFAAGGIPFIFDPGQALPLFNGPELREFIEQADYVVVNDYESNLLQTRTGWNEQDIVSRVQAYITTQGSAGALVHTPEKTYDIPPAHTRRVVDPTGCGDAFRAGLIYGIQHNYDWLTIGRMGNLMGALKVEHPGTQNQRFDFAEFNDQFKQYFGYAL

SEQ ID NO: 989 - DNA, 963 bp, synthetic construct
  misc_feature 1..963: note = Variant of adenosine kinase
  source 1..963: mol_type = other DNA
atgcaccatcatcaccatcacgggggctccggcatgagtgcactgatttgcggttctttagcgtatgataccatcatggtgtttccggaccagttcaagaaccatattctgcccgatcgtgttcaccgcctcaatgtcagctttcttgtaccacgcatgcgtcgtgaatttggaggctgtgccggcaacattgcgtacaatctgcatctgttgggtggtgctccgatcgtaatggctacggtgggccaagatttcggtccgtatcgcgagcacttcgaaactctgggcattgacttatcccgcgtcaagatcatcgatgatctgagtacaccgcaggccttcattaccaccgacatggatcataaccagattacggcgtttcatggcggcgcaatgatgcgttcgtacgaaaatcacgttcgtgatgtgccgggtgttaccttgggcctcgtaggtcctgatggacgcgagggcatgatccaaaatgccgaagaatttgctgctggtggcattccgttcatttttgacccaggtcaggcactgccgctgttcaacggccccgaactgcgcgagtttatcgaacaggcggactatgtggtggtcaacgattacgaaagcaatcttcttcaaacgcgtactggctggaacgagcaggacattgtttcacgcgtgggtgcgtatatcaccacgcaaggttcggctggagccctggtacatacaccggagaagacctacgatattccgccggctcacacccgtcgtgtcgttgatccaactggttgcggcgacgcgtttcgcgccggcctgatctatggtattcagcataattatgattggttgaccattggccgcatgggaaacttaatgggtgcgctgaaagtggaacaccctggcacccaaaatcagcgtttcgattttgccgaattcaacgaccagttcaaacaatattttggctacgcgctc

SEQ ID NO: 990 - protein, 321 aa, synthetic construct
  REGION 1..321: note = Variant of adenosine kinase
MHHHHHHGGSGMSALICGSLAYDTIMVFPDQFKNHILPDRVHRLNVSFLVPRMRREFGGCAGNIAYNLHLLGGAPIVMATVGQDFGPYREHFETLGIDLSRVKIIDDLSTPQAFITTDMDHNQITAFHGGAMMRSYENHVRDVPGVTLGLVGPDGREGMIQNAEEFAAGGIPFIFDPGQALPLFNGPELREFIEQADYVVVNDYESNLLQTRTGWNEQDIVSRVGAYITTQGSAGALVHTPEKTYDIPPAHTRRVVDPTGCGDAFRAGLIYGIQHNYDWLTIGRMGNLMGALKVEHPGTQNQRFDFAEFNDQFKQYFGYAL

SEQ ID NO: 991 - DNA, 963 bp, synthetic construct
  misc_feature 1..963: note = Variant of adenosine kinase
  source 1..963: mol_type = other DNA
atgcaccatcatcaccatcacgggggctccggcatgagtgcactgatttgcggttctttagcgtatgataccatcatggtgtttccggaccagttcaagaaccatattctgcccgatcgtgttcaccgcctcaatgtcagctttcttgtaccacgcatgcgtcgtgaatttggaggctgtgccggcaacattgcgtacaatctgcatctgttgggtggtgctccgatcgtaatggctacggtgggccaagatttcggtccgtatcgcgagcacttcgaaactctgggcattgacttatcccgcgtcaagatcatcggtgatctgagtacaccgcaggccttcattaccaccgacatggatcataaccagattacggcgtttcatggcggcgcaatgatgcgttcgtacgaaaatcacgttcgtgatgtgccgggtgttaccttgggcctcgtaggtcctgatggacgcgagggcatgatccaaaatgccgaagaatttgctgctggtggcattccgttcatttttgacccaggtcaggcactgccgctgttcaacggccccgaactgcgcgagtttatcgaacaggcggactatgtggtggtcaacgattacgaaagcaatcttcttcaaacgcgtactggctggaacgagcaggacattgtttcacgcgtgcaggcgtatatcaccacgcaaggttcggctggagccctggtacatacaccggagaagacctacgatattccgccggctcacacccgtcgtgtcgttgatccaactggttgcggcgacgcgtttcgcgccggcctgatctatggtattcagcataattatgattggttgaccattggccgcatgggaaacttaatgggtgcgctgaaagtggaacaccctggcacccaaaatcagcgtttcgattttgccgaattcaacgaccagttcaaacaatattttggctacgcgctc

SEQ ID NO: 992 - protein, 321 aa, synthetic construct
  REGION 1..321: note = Variant of adenosine kinase
MHHHHHHGGSGMSALICGSLAYDTIMVFPDQFKNHILPDRVHRLNVSFLVPRMRREFGGCAGNIAYNLHLLGGAPIVMATVGQDFGPYREHFETLGIDLSRVKIIGDLSTPQAFITTDMDHNQITAFHGGAMMRSYENHVRDVPGVTLGLVGPDGREGMIQNAEEFAAGGIPFIFDPGQALPLFNGPELREFIEQADYVVVNDYESNLLQTRTGWNEQDIVSRVQAYITTQGSAGALVHTPEKTYDIPPAHTRRVVDPTGCGDAFRAGLIYGIQHNYDWLTIGRMGNLMGALKVEHPGTQNQRFDFAEFNDQFKQYFGYAL

SEQ ID NO: 993 - DNA, 963 bp, synthetic construct
  misc_feature 1..963: note = Variant of adenosine kinase
  source 1..963: mol_type = other DNA
atgcaccatcatcaccatcacgggggctccggcatgagtgcactgatttgcggttctttagcgtatgataccatcatggtgtttccggaccagttcaagaaccatattctgcccgatcgtgttcaccgcctcaatgtcagctttcttgtaccacgcatgcgtcgtgagtttggaggctgtgccggcaacattgcgtacaatctgcatctgttgggtggtgctccgatcgtaatggctacggtgggccaagatttcggtccgtatcgcgagcacttcgaaactctgggcattgacttatcccgcgtcaagatcatcgatgatctgagtacaccgcaggccttcattaccaccgacatggatctgaaccagattacggcgtttcatggcggcgcaatgatgcgttcgtacgaaaatcacgttcgtgatgtgccgggtgttaccttgggcctcgtaggtcctgatggacgcgagggcatgatccaaaatgccgaagaatttgctgctggtggcattccgttcatttttgacccaggtcaggcactgccgctgttcaacggccccgaactgcgcgagtttatcgaacaggcggactatgtggtggtcaacgattacgaaagcaatcttcttcaaacgcgtactggctggaacgagcaggacattgtttcacgcgtgcaggcgtatatcaccacgcaaggttcggctggagccctggtacatacaccggagaagacctacgatattccgccggctcacacccgtcgtgtcgttgatccaactggttgcggcgacgcgtttcgcgccggcctgatctatggtattcagcataattatgattggttgaccattggccgcatgggaaacttaatgggtgcgctgaaagtggaacaccctggcacccaaaatcagcgtttcgattttgccgaattcaacgaccagttcaaacaatattttggctacgcgctc

SEQ ID NO: 994 - protein, 321 aa, synthetic construct
  REGION 1..321: note = Variant of adenosine kinase
MHHHHHHGGSGMSALICGSLAYDTIMVFPDQFKNHILPDRVHRLNVSFLVPRMRREFGGCAGNIAYNLHLLGGAPIVMATVGQDFGPYREHFETLGIDLSRVKIIDDLSTPQAFITTDMDLNQITAFHGGAMMRSYENHVRDVPGVTLGLVGPDGREGMIQNAEEFAAGGIPFIFDPGQALPLFNGPELREFIEQADYVVVNDYESNLLQTRTGWNEQDIVSRVQAYITTQGSAGALVHTPEKTYDIPPAHTRRVVDPTGCGDAFRAGLIYGIQHNYDWLTIGRMGNLMGALKVEHPGTQNQRFDFAEFNDQFKQYFGYAL

SEQ ID NO: 995 - DNA, 963 bp, synthetic construct
  misc_feature 1..963: note = Variant of adenosine kinase
  source 1..963: mol_type = other DNA
atgcaccatcatcaccatcacgggggctccggcatgagtgcactgatttgcggttctttagcgtatgataccatcatggtgtttccggacctgttcaagaaccatattctgcccgatcgtgttcaccgcctcaatgtcagctttcttgtaccacgcatgcgtcgtgaatttggaggctgtgccggcaacattgcgtacaatctgcatctgttgggtggtgctccgatcgtaatggctacggtgggccaagatttcggtccgtatcgcgagcacttcgaaactctgggcattgacttatcccgcgtcaagatcatcgatgatctgagtacaccgcagtcgttcattaccaccgacatggatcataaccagattacggcgtttcacggcggcgcaatgatgcgttcgtacgaaaatcacgttcgtgatgtgccgggtgttaccttgggcctcgtaggtcctgatggacgcgagggcatgatccaaaatgccgaagaatttgctgctggtggcattccgttcatttttgacccaggtcaggcagtgccgctgttcaacggccccgaactgcgcgagtttatcgaacaggcggactatgtggtggtcaacgattacgaaagcaatcttcttcaaacgcgtactggctggaacgagcaggacattgtttcacgcgtgcaggcgtatatcaccacgcaaggttcggctggagccctggtacatacaccggagaagacctacgatattccgccggctcacacccgtcgtgtcgttgatccaactggttgcggcgacgcgtttcgcgccggcctgatctatggtattcagcataattatgattggttgaccattggccgcatgggaaacttaatgggtgcgctgaaagtggaacaccctggcacccaaaatcagcgtttcgattttgccgaattcaacgaccagttcaaacaatattttggctacgcgctc

SEQ ID NO: 996 - protein, 321 aa, synthetic construct
  REGION 1..321: note = Variant of adenosine kinase
MHHHHHHGGSGMSALICGSLAYDTIMVFPDLFKNHILPDRVHRLNVSFLVPRMRREFGGCAGNIAYNLHLLGGAPIVMATVGQDFGPYREHFETLGIDLSRVKIIDDLSTPQSFITTDMDHNQITAFHGGAMMRSYENHVRDVPGVTLGLVGPDGREGMIQNAEEFAAGGIPFIFDPGQAVPLFNGPELREFIEQADYVVVNDYESNLLQTRTGWNEQDIVSRVQAYITTQGSAGALVHTPEKTYDIPPAHTRRVVDPTGCGDAFRAGLIYGIQHNYDWLTIGRMGNLMGALKVEHPGTQNQRFDFAEFNDQFKQYFGYAL

SEQ ID NO: 997 - DNA, 963 bp, synthetic construct
  misc_feature 1..963: note = Variant of adenosine kinase
  source 1..963: mol_type = other DNA
atgcaccatcatcaccatcacgggggctccggcatgagtgcactgatttgcggttctttagcgtatgataccatcatggtgtttccggaccagttcaagaaccatattctgcccgatcgtgttcaccgcctcaatgtcagctttcttgtaccacgcatgcgtcgtgaatttggaggctgtgccggcaacattgcgtacaatctgcatctgttgggtggtgctccgatcgtaatggctacggtgggccaagatttcggtccgtatcgcgagcacttcgaaactctgggcattgacttatcccgcgtcaagatcatcgatgatctgagtacaccgcaggccttcattaccaccgacatggatcataaccagattacggcgtttcatggcggcgcaatgatgcgttcgtacgaaaatcacgttcgtgatgtgccgggtgttaccttgggcctcgtaggtcctgatggacgcgagggcatgatccaaaatgccgaagaatttgctgctggtggcattccgttcatttttgacccaggtcaggcactgccgctgttcaacggccccgaactgcgcgcttttatcgaacaggcggactatgtggtggtcaacgattacgaaagcaatcttcttcaaacgcgtactggctggaacgagcaggacattgtttcacgcgtgcaggcgtatatcaccacgcaaggttcggctggagccctggtacatacaccggagaagacctacgatattccgccggctcacacccgtcgtgtcgttgatccaactggttgcggcgacgcgtttcgcgccggcctgatctatggtattcagcataattatgattggttgaccattggccgcatgggaaacttaatgggtgcgctgaaagtggaacaccctggcacccaaaatcagcgtttcgattttgccgaattcaacgaccagttcaaacaatattttggctacgcgctc

SEQ ID NO: 998 - protein, 321 aa, synthetic construct
  REGION 1..321: note = Variant of adenosine kinase
MHHHHHHGGSGMSALICGSLAYDTIMVFPDQFKNHILPDRVHRLNVSFLVPRMRREFGGCAGNIAYNLHLLGGAPIVMATVGQDFGPYREHFETLGIDLSRVKIIDDLSTPQAFITTDMDHNQITAFHGGAMMRSYENHVRDVPGVTLGLVGPDGREGMIQNAEEFAAGGIPFIFDPGQALPLFNGPELRAFIEQADYVVVNDYESNLLQTRTGWNEQDIVSRVQAYITTQGSAGALVHTPEKTYDIPPAHTRRVVDPTGCGDAFRAGLIYGIQHNYDWLTIGRMGNLMGALKVEHPGTQNQRFDFAEFNDQFKQYFGYAL

SEQ ID NO: 999 - DNA, 963 bp, synthetic construct
  misc_feature 1..963: note = Variant of adenosine kinase
  source 1..963: mol_type = other DNA
atgcaccatcatcaccatcacgggggctccggcatgagtgcactgatttgcggttctttagcgtatgataccatcatggtgtttccggaccagttcaagaaccatattctgcccgatcgtgttcaccgcctcaatgtcagctttcttgtaccacgcatgcgtcgtgaatttggaggctgtgccggcaacattgcgtacaatctgcatctgttgggtggtgctccgatcgtaatggctacggtgggccaagatttcggtccgtatcgcgagcacttcgaaactctgggcattgacttatcccgcgtcaagatcatcgatgatctgagtacaccgcaggccttcattaccaccgacatggatcataaccagattacggcgtttcatggcggcgcaatgatgcgttcgtacgaaaatcacgttcgtgatgtgccgggtgttaccttgggcctcgtaggtcctgatggacgcgagggcatgatccaaaatgccgaagaatttgctgctggtggcattccgttcatttttgacccaggtcaggcactgccgctgttcaacggccccgaactgcgcagttttatcgaacaggcggactatgtggtggtcaacgattacgaaagcaatcttcttcaaacgcgtactggctggaacgagcaggacattgtttcacgcgtgcaggcgtatatcaccacgcaaggttcggctggagccctggtacatacaccggagaagacctacgatattccgccggctcacacccgtcgtgtcgttgatccaactggttgcggcgacgcgtttcgcgccggcctgatctatggtattcagcataattatgattggttgaccattggccgcatgggaaacttaatgggtgcgctgaaagtggaacaccctggcacccaaaatcagcgtttcgattttgccgaattcaacgaccagttcaaacaatattttggctacgcgctc

SEQ ID NO: 1000 - protein, 321 aa, synthetic construct
  REGION 1..321: note = Variant of adenosine kinase
MHHHHHHGGSGMSALICGSLAYDTIMVFPDQFKNHILPDRVHRLNVSFLVPRMRREFGGCAGNIAYNLHLLGGAPIVMATVGQDFGPYREHFETLGIDLSRVKIIDDLSTPQAFITTDMDHNQITAFHGGAMMRSYENHVRDVPGVTLGLVGPDGREGMIQNAEEFAAGGIPFIFDPGQALPLFNGPELRSFIEQADYVVVNDYESNLLQTRTGWNEQDIVSRVQAYITTQGSAGALVHTPEKTYDIPPAHTRRVVDPTGCGDAFRAGLIYGIQHNYDWLTIGRMGNLMGALKVEHPGTQNQRFDFAEFNDQFKQYFGYAL

SEQ ID NO: 1001 - DNA, 963 bp, synthetic construct
  misc_feature 1..963: note = Variant of adenosine kinase
  source 1..963: mol_type = other DNA
atgcaccatcatcaccatcacgggggctccggcatgagtgcactgatttgcggttctttagcgtatgataccatcatggtgtttccggaccagttcaagaaccatattctgcccgatcgtgttcaccgcctcaatgtcagctttcttgtaccacgcatgcgtcgtgaatttggaggctgtgccggcaacattgcgtacaatctgcatctgttgggtggtgctccgatcgtaatggctacggtgggccaagatttcggtccgtatcgcgagcacttcgaaactctgggcattgacttatcccgcgtcaagatcatcgatgatctgagtacaccgcaggccttcattaccaccgacatggatcataaccagattacggcgtttcatggcggcgcaatgatgcgttcgtacgaaaatcacgttcgtgatgtgccgggtgttaccttgggcctcgtaggtcctgatggacgcgagggcatgatccaaaatgccgaagaatttgctgctggtggcattccgttcatttttgacccaggtcaggcactgccgctgttcaacggccccgaactgcgcgagtttatcgaacaggcggactatgtggtggtcaacgattacgaaagcaatcttcttcaaattcgtactggctggaacgagcaggacattgtttcacgcgtgcaggcgtatatcaccacgcaaggttcggctggagccctggtacatacaccggagaagacctacgatattccgccggctcacacccgtcgtgtcgttgatccaactggttgcggcgacgcgtttcgcgccggcctgatctatggtattcagcataattatgattggttgaccattggccgcatgggaaacttaatgggtgcgctgaaagtggaacaccctggcacccaaaatcagcgtttcgattttgccgaattcaacgaccagttcaaacaatattttggctacgcgctc

SEQ ID NO: 1002 - protein, 321 aa, synthetic construct
  REGION 1..321: note = Variant of adenosine kinase
MHHHHHHGGSGMSALICGSLAYDTIMVFPDQFKNHILPDRVHRLNVSFLVPRMRREFGGCAGNIAYNLHLLGGAPIVMATVGQDFGPYREHFETLGIDLSRVKIIDDLSTPQAFITTDMDHNQITAFHGGAMMRSYENHVRDVPGVTLGLVGPDGREGMIQNAEEFAAGGIPFIFDPGQALPLFNGPELREFIEQADYVVVNDYESNLLQIRTGWNEQDIVSRVQAYITTQGSAGALVHTPEKTYDIPPAHTRRVVDPTGCGDAFRAGLIYGIQHNYDWLTIGRMGNLMGALKVEHPGTQNQRFDFAEFNDQFKQYFGYAL

SEQ ID NO: 1003 - DNA, 963 bp, synthetic construct
  misc_feature 1..963: note = Variant of adenosine kinase
  source 1..963: mol_type = other DNA
atgcaccatcatcaccatcacgggggctccggcatgagtgcactgatttgcggttctttagcgtatgataccatcatggtgtttccggaccagttcaagaactcgattctgcccgatcgtgttcaccgcctcaatgtcagctttcttgtaccacgcatgcgtcgtgaatttggaggctgtgccggcaacattgcgtacaatctgcatctgttgggtggtgctccgatcgtaatggctacggtgggccaagatttcggtccgtatcgcgagcacttcgaaactctgggcattgacttatcccgcgtcaagatcatcgatgatctgagtacaccgcaggccttcattaccaccgacatggatcataaccagattacggcgtttcatggcggcgcaatgatgcgttcgtacgaaaatcacgttcgtgatgtgccgggtgttaccttgggcctcgtaggtcctgatggacgcgagggcatgatccaaaatgccgaagaatttgctgctggtggcattccgttcatttttgacccaggtcaggcactgccgctgttcaacggccccgaactgcgcgagtttatcgaacaggcggactatgtggtggtcaacgattacgaaagcaatcttcttcaaacgcgtactggctggaacgagcaggacattgtttcacgcgtgcaggcgtatatcaccacgcaaggttcggctggagccctggtacatacaccggagaagacctacgatattccgccggctcacacccgtcgtgtcgttgatccaactggttgcggcgacgcgtttcgcgccggcctgatctatggtattcagcataattatgattggttgaccattggccgcatgggaaacttaatgggtgcgctgaaagtggaacaccctggcacccaaaatcagcgtttcgattttgccgaattcaacgaccagttcaaacaatattttggctacgcgctc

SEQ ID NO: 1004 - protein, 321 aa, synthetic construct
  REGION 1..321: note = Variant of adenosine kinase
MHHHHHHGGSGMSALICGSLAYDTIMVFPDQFKNSILPDRVHRLNVSFLVPRMRREFGGCAGNIAYNLHLLGGAPIVMATVGQDFGPYREHFETLGIDLSRVKIIDDLSTPQAFITTDMDHNQITAFHGGAMMRSYENHVRDVPGVTLGLVGPDGREGMIQNAEEFAAGGIPFIFDPGQALPLFNGPELREFIEQADYVVVNDYESNLLQTRTGWNEQDIVSRVQAYITTQGSAGALVHTPEKTYDIPPAHTRRVVDPTGCGDAFRAGLIYGIQHNYDWLTIGRMGNLMGALKVEHPGTQNQRFDFAEFNDQFKQYFGYAL

SEQ ID NO: 1005 - DNA, 963 bp, synthetic construct
  misc_feature 1..963: note = Variant of adenosine kinase
  source 1..963: mol_type = other DNA
atgcaccatcatcaccatcacgggggctccggcatgagtgcactgatttgcggttctttagcgtatgataccatcatggtgtttccggaccagttcaagaaccatattctgcccgatcgtgttcaccgcctcaatgtcagctttcttgtaccacgcatgcgtcgtgaatttggaggctgtgccggcaacattgcgtacaatctgcatctgttgggtggtgctccgatcgtaatggctacggtgggccaagatttcggtccgtatcgcgagcacttcgaaactctgggcattgacttatcccgcgtcaagatcatcgatgatctgagtacaccgcaggccttcattaccaccgacatggatcataaccagattacggcgtttcatggcggcgcaatgatgcgttcgtacgaaaatcacgttcgtgatgtgccgggtgttaccttgggcctcgtaggtcctgatggacgcgagggcatgatccaaaatgccgaagaatttgctgctggtggcattccgttcatttttgacccaggtcaggcactgccgctgttcaacggccccgaactgattgagtttatcgaacaggcggactatgtggtggtcaacgattacgaaagcaatcttcttcaaacgcgtactggctggaacgagcaggacattgtttcacgcgtgcaggcgtatatcaccacgcaaggttcggctggagccctggtacatacaccggagaagacctacgatattccgccggctcacacccgtcgtgtcgttgatccaactggttgcggcgacgcgtttcgcgccggcctgatctatggtattcagcataattatgattggttgaccattggccgcatgggaaacttaatgggtgcgctgaaagtggaacaccctggcacccaaaatcagcgtttcgattttgccgaattcaacgaccagttcaaacaatattttggctacgcgctc

SEQ ID NO: 1006 - protein, 321 aa, synthetic construct
  REGION 1..321: note = Variant of adenosine kinase
MHHHHHHGGSGMSALICGSLAYDTIMVFPDQFKNHILPDRVHRLNVSFLVPRMRREFGGCAGNIAYNLHLLGGAPIVMATVGQDFGPYREHFETLGIDLSRVKIIDDLSTPQAFITTDMDHNQITAFHGGAMMRSYENHVRDVPGVTLGLVGPDGREGMIQNAEEFAAGGIPFIFDPGQALPLFNGPELIEFIEQADYVVVNDYESNLLQTRTGWNEQDIVSRVQAYITTQGSAGALVHTPEKTYDIPPAHTRRVVDPTGCGDAFRAGLIYGIQHNYDWLTIGRMGNLMGALKVEHPGTQNQRFDFAEFNDQFKQYFGYAL

SEQ ID NO: 1007 - DNA, 963 bp, synthetic construct
  misc_feature 1..963: note = Variant of adenosine kinase
  source 1..963: mol_type = other DNA
atgcaccatcatcaccatcacgggggctccggcatgagtgcactgatttgcggttctttagcgtatgataccatcatggtgtttccggaccagttcaagaaccatattctgcccgatcgtgttcaccgcctcaatgtcagctttcttgtaccacgcatgcgtcgtgaatttggaggctgtgccggcaacattgcgtacaatctgcatctgttgggtggtgctccgatcgtaatggctacggtgggccaagatttcggtccgtatcgcgagcacttcgaaactctgggcattgacttatcccgcgtcaagatcatcgatgatctgagtacaccgcaggccttcattaccaccgacatggatcataaccagattacggcgtttcatggcggcgcaatgatgcgttcgtacgaaaatcacgttcgtgatgtgccgggtgttaccttgggcctcgtaggtcctgatggacgcgagggcatgatccaaaatgccaaggaatttgctgctggtggcattccgttcatttttgacccaggtcaggcactgccgctgttcaacggccccgaactgcgcgagtttatcgaacaggcggactatgtggtggtcaacgattacgaaagcaatcttcttcaaacgcgtactggctggaacgagcaggacattgtttcacgcgtgcaggcgtatatcaccacgcaaggttcggctggagccctggtacatacaccggagaagacctacgatattccgccggctcacacccgtcgtgtcgttgatccaactggttgcggcgacgcgtttcgcgccggcctgatctatggtattcagcataattatgattggttgaccattggccgcatgggaaacttaatgggtgcgctgaaagtggaacaccctggcacccaaaatcagcgtttcgattttgccgaattcaacgaccagttcaaacaatattttggctacgcgctc

SEQ ID NO: 1008 - protein, 321 aa, synthetic construct
  REGION 1..321: note = Variant of adenosine kinase
MHHHHHHGGSGMSALICGSLAYDTIMVFPDQFKNHILPDRVHRLNVSFLVPRMRREFGGCAGNIAYNLHLLGGAPIVMATVGQDFGPYREHFETLGIDLSRVKIIDDLSTPQAFITTDMDHNQITAFHGGAMMRSYENHVRDVPGVTLGLVGPDGREGMIQNAKEFAAGGIPFIFDPGQALPLFNGPELREFIEQADYVVVNDYESNLLQTRTGWNEQDIVSRVQAYITTQGSAGALVHTPEKTYDIPPAHTRRVVDPTGCGDAFRAGLIYGIQHNYDWLTIGRMGNLMGALKVEHPGTQNQRFDFAEFNDQFKQYFGYAL

SEQ ID NO: 1009 - DNA, 963 bp, synthetic construct
  misc_feature 1..963: note = Variant of adenosine kinase
  source 1..963: mol_type = other DNA
atgcaccatcatcaccatcacgggggctccggcatgagtgcactgatttgcggttctttagcgtatgataccatcatggtgtttccggaccagttcaagaaccatattctgcccgatcgtgttcaccgcctcaatgtcagctttcttgtaccacgcatgcgtcgtgaatttggaggctgtgccggcaacattgcgtacaatctgcatctgttgggtggtgctccgatcgtaatggctacggtgggccaagatttcggtccgtatcgcgagcacttcgaaactctgggcattgacttatcccgcgtcaagatcatcgatgatctgagtacaccgcaggccttcattaccaccgacatggatcataaccagattacggcgtttcatggcggcgcaatgatgcgttcgtacgaaaatcacgttcgtgatgtgccgggtgttaccttgggcctcgtaggtcctgatggacgcgagggcatgatccaaaatgccgaagaatttgctgctggtggctgtccgttcatttttgacccaggtcaggcactgccgctgttcaacggccccgaactgcgcgagtttatcgaacaggcggactatgtggtggtcaacgattacgaaagcaatcttcttcaaacgcgtactggctggaacgagcaggacattgtttcacgcgtgcaggcgtatatcaccacgcaaggttcggctggagccctggtacatacaccggagaagacctacgatattccgccggctcacacccgtcgtgtcgttgatccaactggttgcggcgacgcgtttcgcgccggcctgatctatggtattcagcataattatgattggttgaccattggccgcatgggaaacttaatgggtgcgctgaaagtggaacaccctggcacccaaaatcagcgtttcgattttgccgaattcaacgaccagttcaaacaatattttggctacgcgctc

SEQ ID NO: 1010 - protein, 321 aa, synthetic construct
  REGION 1..321: note = Variant of adenosine kinase
MHHHHHHGGSGMSALICGSLAYDTIMVFPDQFKNHILPDRVHRLNVSFLVPRMRREFGGCAGNIAYNLHLLGGAPIVMATVGQDFGPYREHFETLGIDLSRVKIIDDLSTPQAFITTDMDHNQITAFHGGAMMRSYENHVRDVPGVTLGLVGPDGREGMIQNAEEFAAGGCPFIFDPGQALPLFNGPELREFIEQADYVVVNDYESNLLQTRTGWNEQDIVSRVQAYITTQGSAGALVHTPEKTYDIPPAHTRRVVDPTGCGDAFRAGLIYGIQHNYDWLTIGRMGNLMGALKVEHPGTQNQRFDFAEFNDQFKQYFGYAL

SEQ ID NO: 1011 - DNA, 963 bp, synthetic construct
  misc_feature 1..963: note = Variant of adenosine kinase
  source 1..963: mol_type = other DNA
atgcaccatcatcaccatcacgggggctccggcatgagtgcactgatttgcggttctttagcgtatgataccatcatggtgtttccggaccagttcaagaaccatattctgcccgatcgtgttcaccgcctcaatgtcagctttcttgtaccacgcatgcgtcgtgaatttggaggctgtgccggcaacattgcgtacaatctgcatctgttgggtggtgctccgatcgtaatggctacggtgggccaagatttcggtccgtatcgcgagcacttcgaaactctgggcattgacttatcccgcgtcaagatcatcgatgatctgagtacaccgcaggccttcattaccaccgacatggatcataaccagattacggcgtttcatggcggcgcaatgatgcgttcgtacgaaaatcacgttcgtgatgtgccgggtgttaccttgggcctcgtaggtcctgatggacgcgagggcatgatccaaaatgccgaagaatttgctgctggtggcattccgttcatttttgacccaggtcaggcactgccgctgttcaacggccccgaactgcgcgagtttatcgaacaggcggactatgtggtggtcaacgattacgaaagcaatcttcttcaatttcgtactggctggaacgagcaggacattgtttcacgcgtgcaggcgtatatcaccacgcaaggttcggctggagccctggtacatacaccggagaagacctacgatattccgccggctcacacccgtcgtgtcgttgatccaactggttgcggcgacgcgtttcgcgccggcctgatctatggtattcagcataattatgattggttgaccattggccgcatgggaaacttaatgggtgcgctgaaagtggaacaccctggcacccaaaatcagcgtttcgattttgccgaattcaacgaccagttcaaacaatattttggctacgcgctc

SEQ ID NO: 1012 - protein, 321 aa, synthetic construct
  REGION 1..321: note = Variant of adenosine kinase
MHHHHHHGGSGMSALICGSLAYDTIMVFPDQFKNHILPDRVHRLNVSFLVPRMRREFGGCAGNIAYNLHLLGGAPIVMATVGQDFGPYREHFETLGIDLSRVKIIDDLSTPQAFITTDMDHNQITAFHGGAMMRSYENHVRDVPGVTLGLVGPDGREGMIQNAEEFAAGGIPFIFDPGQALPLFNGPELREFIEQADYVVVNDYESNLLQFRTGWNEQDIVSRVQAYITTQGSAGALVHTPEKTYDIPPAHTRRVVDPTGCGDAFRAGLIYGIQHNYDWLTIGRMGNLMGALKVEHPGTQNQRFDFAEFNDQFKQYFGYAL

SEQ ID NO: 1013 - DNA, 963 bp, synthetic construct
  misc_feature 1..963: note = Variant of adenosine kinase
  source 1..963: mol_type = other DNA
atgcaccatcatcaccatcacgggggctccggcatgagtgcactgatttgcggttctttagcgtatgataccatcatggtgtttccggaccagttcaagaaccatattctgcccgatcgtgttcaccgcctcaatgtcagctttcttgtaccacgcatgcgtcgtgaatttggaggctgtgccggcaacattgcgtacaatctgcatctgttgggtggtgctccgatcgtaatggctacggtgggccaagatttcggtccgtatcgcgagcacttcgaaactctgggcattgacttatcccgcgtcaagatcatcgatgatctgagtacaccgcaggccttcattaccaccgacatggatcataaccagattacggcgtttcatggcggcgcaatgatgcgttcgtacgaaaatcacgttcgtgatgtgccgggtgttaccttgggcctcgtaggtcctgatggacgcgagggcatgatccaaaatgccgaagaatttgctgctggtggcattccgttcatttttgacccaggtcaggcactgccgctgttcaacggccccgaactgcgcgagtttatcgaacaggcggactatgtggtggtcaacgattacgaaagcaatcttcttcaactgcgtactggctggaacgagcaggacattgtttcacgcgtgcaggcgtatatcaccacgcaaggttcggctggagccctggtacatacaccggagaagacctacgatattccgccggctcacacccgtcgtgtcgttgatccaactggttgcggcgacgcgtttcgcgccggcctgatctatggtattcagcataattatgattggttgaccattggccgcatgggaaacttaatgggtgcgctgaaagtggaacaccctggcacccaaaatcagcgtttcgattttgccgaattcaacgaccagttcaaacaatattttggctacgcgctc

SEQ ID NO: 1014 - protein, 321 aa, synthetic construct
  REGION 1..321: note = Variant of adenosine kinase
MHHHHHHGGSGMSALICGSLAYDTIMVFPDQFKNHILPDRVHRLNVSFLVPRMRREFGGCAGNIAYNLHLLGGAPIVMATVGQDFGPYREHFETLGIDLSRVKIIDDLSTPQAFITTDMDHNQITAFHGGAMMRSYENHVRDVPGVTLGLVGPDGREGMIQNAEEFAAGGIPFIFDPGQALPLFNGPELREFIEQADYVVVNDYESNLLQLRTGWNEQDIVSRVQAYITTQGSAGALVHTPEKTYDIPPAHTRRVVDPTGCGDAFRAGLIYGIQHNYDWLTIGRMGNLMGALKVEHPGTQNQRFDFAEFNDQFKQYFGYAL

SEQ ID NO: 1015 - DNA, 963 bp, synthetic construct
  misc_feature 1..963: note = Variant of adenosine kinase
  source 1..963: mol_type = other DNA
atgcaccatcatcaccatcacgggggctccggcatgagtgcactgatttgcggttctttagcgtatgataccatcatggtgtttccggaccagttcaagaaccatattctgcccgatcgtgttcaccgcctcaatgtcagctttcttgtaccacgcatgcgtcgtgaatttggaggctgtgccggcaacattgcgtacaatctgcatctgttgggtggtgctccgatcgtaatggctacggtgggccaagatttcggtccgtatcgcgagcacttcgaaactctgggcattgacttatcccgcgtcaagatcatcgatgatctgagtacaccgcaggccttcattaccaccgacatggatcataaccagattacggcgtttcatggcggcgcaatgatgcgttcgtacgaaaatcacgttcgtgatgtgccgggtgttaccttgggcctcgtaggtcctgatggacgcgagggcatgatccaaaatgccgaagaatttgctgctggtggcattccgttcatttttgacccaggtcaggcactgccgctgttcaacggccccgaactgcgcgagtttatcgaacaggcggactatgtggtggtcaacgattacgaaagcaatcttcttcaaacgcgtactggctggaacgagcaggacattgtttcacgcgtggaggcgtatatcaccacgcaaggttcggctggagccctggtacatacaccggagaagacctacgatattccgccggctcacacccgtcgtgtcgttgatccaactggttgcggcgacgcgtttcgcgccggcctgatctatggtattcagcataattatgattggttgaccattggccgcatgggaaacttaatgggtgcgctgaaagtggaacaccctggcacccaaaatcagcgtttcgattttgccgaattcaacgaccagttcaaacaatattttggctacgcgctc

SEQ ID NO: 1016 - protein, 321 aa, synthetic construct
  REGION 1..321: note = Variant of adenosine kinase
MHHHHHHGGSGMSALICGSLAYDTIMVFPDQFKNHILPDRVHRLNVSFLVPRMRREFGGCAGNIAYNLHLLGGAPIVMATVGQDFGPYREHFETLGIDLSRVKIIDDLSTPQAFITTDMDHNQITAFHGGAMMRSYENHVRDVPGVTLGLVGPDGREGMIQNAEEFAAGGIPFIFDPGQALPLFNGPELREFIEQADYVVVNDYESNLLQTRTGWNEQDIVSRVEAYITTQGSAGALVHTPEKTYDIPPAHTRRVVDPTGCGDAFRAGLIYGIQHNYDWLTIGRMGNLMGALKVEHPGTQNQRFDFAEFNDQFKQYFGYAL

SEQ ID NO: 1017 - DNA, 963 bp, synthetic construct
  misc_feature 1..963: note = Variant of adenosine kinase
  source 1..963: mol_type = other DNA
atgcaccatcatcaccatcacgggggctccggcatgagtgcactgatttgcggttctttagcgtatgataccatcatggtgtttccggaccagttcaagaaccatattctgcccgatcgtgttcaccgcctcaatgtcagctttcttgtaccacgcatgcgtcgtgaatttggaggctgtgccggcaacattgcgtacaatctgcatctgttgggtggtgctccgatcgtaatggctacggtgggccaagatttcggtccgtatcgcgagcacttcgaaactctgggcattgacttatcccgcgtcaagatcatcgatgatctgagtacaccgcaggccttcattaccaccgacatggatcataaccagattacggcgtttcatggcggcgcaatgatgcgttcgtacgaaaatcacgttcgtgatgtgccgggtgttaccttgggcctcgtaggtcctgatggacgcgagggcatgatccaaaatgccgaagaatttgctgctggtggcattccgttcatttttgacccaggtcaggcactgccgctgttcaacggccccgaactgcgcgagtttatcgaaggtgcggactatgtggtggtcaacgattacgaaagcaatcttcttcaaacgcgtactggctggaacgagcaggacattgtttcacgcgtgcaggcgtatatcaccacgcaaggttcggctggagccctggtacatacaccggagaagacctacgatattccgccggctcacacccgtcgtgtcgttgatccaactggttgcggcgacgcgtttcgcgccggcctgatctatggtattcagcataattatgattggttgaccattggccgcatgggaaacttaatgggtgcgctgaaagtggaacaccctggcacccaaaatcagcgtttcgattttgccgaattcaacgaccagttcaaacaatattttggctacgcgctc

SEQ ID NO: 1018 - protein, 321 aa, synthetic construct
  REGION 1..321: note = Variant of adenosine kinase
MHHHHHHGGSGMSALICGSLAYDTIMVFPDQFKNHILPDRVHRLNVSFLVPRMRREFGGCAGNIAYNLHLLGGAPIVMATVGQDFGPYREHFETLGIDLSRVKIIDDLSTPQAFITTDMDHNQITAFHGGAMMRSYENHVRDVPGVTLGLVGPDGREGMIQNAEEFAAGGIPFIFDPGQALPLFNGPELREFIEGADYVVVNDYESNLLQTRTGWNEQDIVSRVQAYITTQGSAGALVHTPEKTYDIPPAHTRRVVDPTGCGDAFRAGLIYGIQHNYDWLTIGRMGNLMGALKVEHPGTQNQRFDFAEFNDQFKQYFGYAL

SEQ ID NO: 1019 - DNA, 963 bp, synthetic construct
  misc_feature 1..963: note = Variant of adenosine kinase
  source 1..963: mol_type = other DNA
atgcaccatcatcaccatcacgggggctccggcatgagtgcactgatttgcggttctttagcgtatgataccatcatggtgtttccggaccagttcaagaaccatattctgcccgatcgtgttcaccgcctcaatgtcagctttcttgtaccacgcatgcgtcgtgaatttggaggctgtgccggcaacattgcgtacaatctgcatctgttgggtggtgctccgatcgtaatggctacggtgggccaagatttcggtccgtatcgcgagcacttcgaaactctgggcattgacttatcccgcgtcaagatcatcgatgatctgagtacaccgcaggccttcattaccaccgacatggatcataaccagattacggcgtttcatggcggcgcaatgatgcgttcgtacgaaaatcacgttcgtgatgtgccgggtgttaccttgggcctcgtaggtcctgatggacgcgagggcatgatccaaaatgccgaagaatttgctgctggtggcattccgttcatttttgacccaggtcaggcactgccgctgttcaacggccccgaactgcgcgagtttatcgaacaggcggactatgtggtggtcaacgattacgaaagcaatcttcttcaaacgcgtactggctggaacgagcaggacattgtttcacgcgtgcaggcgtatatcaccacgcaaggttcggctggagccctggtacatacaccggagaagacctacgatattccgccggctcacacccgtcgtgtcgttgatccaactggttgcggcgacgcgtttcgcgccggcctgatctatggtattcagcataattatgattggttgaccattggccgcatgggaaacttaatgggtgcgctgaaagtggaacaccctggcacccaaaatcagcgtttcgattttgccgaattcaacaggcagttcaaacaatattttggctacgcgctc

SEQ ID NO: 1020 - protein, 321 aa, synthetic construct
  REGION 1..321: note = Variant of adenosine kinase
MHHHHHHGGSGMSALICGSLAYDTIMVFPDQFKNHILPDRVHRLNVSFLVPRMRREFGGCAGNIAYNLHLLGGAPIVMATVGQDFGPYREHFETLGIDLSRVKIIDDLSTPQAFITTDMDHNQITAFHGGAMMRSYENHVRDVPGVTLGLVGPDGREGMIQNAEEFAAGGIPFIFDPGQALPLFNGPELREFIEQADYVVVNDYESNLLQTRTGWNEQDIVSRVQAYITTQGSAGALVHTPEKTYDIPPAHTRRVVDPTGCGDAFRAGLIYGIQHNYDWLTIGRMGNLMGALKVEHPGTQNQRFDFAEFNRQFKQYFGYAL

SEQ ID NO: 1021 - DNA, 963 bp, synthetic construct
  misc_feature 1..963: note = Variant of adenosine kinase
  source 1..963: mol_type = other DNA
atgcaccatcatcaccatcacgggggctccggcatgagtgcactgatttgcggttctttagcgtatgataccatcatggtgtttccggaccagttcaagaaccatattctgcccgatcgtgttcaccgcctcaatgtcagctttcttgtaccacgcatgcgtcgtgaatttggaggctgtgccggcaacattgcgtacaatctgcatctgttgggtggtgctccgatcgtaatggctacggtgggccaagatttcggtccgtatcgcgagcacttcgaaactctgggcattgacttatcccgcgtcaagatcatcgatgatctgagtacaccgcaggccttcattaccaccgacatggatcataaccagattacggcgtttcatggcggcgcaatgatgcgttcgtacgaaaatcacgttcgtgatgtgccgggtgttaccttgggcctcgtaggtcctgatggacgcgagggcatgatccaaaatgccgaagaatttgtggctggtggcattccgttcatttttgacccaggtcaggcactgccgctgttcaacggccccgaactgcgcgagtttatcgaacaggcggactatgtggtggtcaacgattacgaaagcaatcttcttcaaacgcgtactggctggaacgagcaggacattgtttcacgcgtgcaggcgtatatcaccacgcaaggttcggctggagccctggtacatacaccggagaagacctacgatattccgccggctcacacccgtcgtgtcgttgatccaactggttgcggcgacgcgtttcgcgccggcctgatctatggtattcagcataattatgattggttgaccattggccgcatgggaaacttaatgggtgcgctgaaagtggaacaccctggcacccaaaatcagcgtttcgattttgccgaattcaacgaccagttcaaacaatattttggctacgcgctc

SEQ ID NO: 1022 - protein, 321 aa, synthetic construct
  REGION 1..321: note = Variant of adenosine kinase
MHHHHHHGGSGMSALICGSLAYDTIMVFPDQFKNHILPDRVHRLNVSFLVPRMRREFGGCAGNIAYNLHLLGGAPIVMATVGQDFGPYREHFETLGIDLSRVKIIDDLSTPQAFITTDMDHNQITAFHGGAMMRSYENHVRDVPGVTLGLVGPDGREGMIQNAEEFVAGGIPFIFDPGQALPLFNGPELREFIEQADYVVVNDYESNLLQTRTGWNEQDIVSRVQAYITTQGSAGALVHTPEKTYDIPPAHTRRVVDPTGCGDAFRAGLIYGIQHNYDWLTIGRMGNLMGALKVEHPGTQNQRFDFAEFNDQFKQYFGYAL

SEQ ID NO: 1023 - DNA, 963 bp, synthetic construct
  misc_feature 1..963: note = Variant of adenosine kinase
  source 1..963: mol_type = other DNA
atgcaccatcatcaccatcacgggggctccggcatgagtgcactgatttgcggttctttagcgtatgataccatcatggtgtttccggaccagttcaagaaccatattctgcccgatcgtgttcaccgcctcaatgtcagctttcttgtaccacgcatgcgtcgtgaatttggaggctgtgccggcaacattgcgtacaatctgcatctgttgggtggtgctccgatcgtaatggctacggtgggccaagatttcggtccgtatcgcgagcacttcgaaactctgggcattgacttatcccgcgtcaagatcatcgatgatctgagtacaccgcaggccttcattaccaccgacatggatcataaccagattacggcgtttcatggcggcgcaatgatgcgttcgtacgaaaatcacgttcgtgatgtgccgggtgttaccttgggcctcgtaggtcctgatggacgcgagggcatgatccaaaatgccgaagaatttgctgctggtggcattccgttcatttttgacccaggtcaggcactgccgctgttcaacggccccgaactgcgcgagtttatcgaacaggcggactatgtggtggtcaacgattacgaaagcaatcttcttcaaacgcgtactggctggaacgagcaggacattgtttcacgcgtgcaggcgtatatcaccacgcaaggttcggctggagccctggtacatacaccggagaagacctacgatattccgccggctcacacccgtcgtgtcgttgatccaactggttgcggcgacgcgtttcgcgccggcctgatctatggtattcagcataattatgattggttgaccattggccgcatgggaaacttaatgggtgcgctgaaagtggaacaccctggcacccaaaatcagcgtttcgattttgccgaattcaacttgcagttcaaacaatattttggctacgcgctc

SEQ ID NO: 1024 - protein, 321 aa, synthetic construct
  REGION 1..321: note = Variant of adenosine kinase
MHHHHHHGGSGMSALICGSLAYDTIMVFPDQFKNHILPDRVHRLNVSFLVPRMRREFGGCAGNIAYNLHLLGGAPIVMATVGQDFGPYREHFETLGIDLSRVKIIDDLSTPQAFITTDMDHNQITAFHGGAMMRSYENHVRDVPGVTLGLVGPDGREGMIQNAEEFAAGGIPFIFDPGQALPLFNGPELREFIEQADYVVVNDYESNLLQTRTGWNEQDIVSRVQAYITTQGSAGALVHTPEKTYDIPPAHTRRVVDPTGCGDAFRAGLIYGIQHNYDWLTIGRMGNLMGALKVEHPGTQNQRFDFAEFNLQFKQYFGYAL

SEQ ID NO: 1025 - DNA, 963 bp, synthetic construct
  misc_feature 1..963: note = Variant of adenosine kinase
  source 1..963: mol_type = other DNA
atgcaccatcatcaccatcacgggggctccggcatgagtgcactgatttgcggttctttagcgtatgataccatcatggtgtttccggaccagttcaagaaccatattctgcccgatcgtgttcaccgcctcaatgtcagctttcttgtaccacgcatgcgtcgtgaatttggaggctgtgccggcaacattgcgtacaatctgcatctgttgggtggtgctccgatcgtaatggctacggtgggccaagatttcggtccgtatcgcgagcacttcgaaactctgggcattgacttatcccgcgtcaagatcatcgatgatctgagtacaccgcaggccttcattaccaccgacatggatcataaccagattacggcgtttcatggcggcgcaatgatgcgttcgtacgaaaatcacgttcgtgatgtgccgggtgttaccttgggcctcgtaggtcctgatggacgcgagggcatgatccaaaatgccgaagaatttgctgttggtggcattccgttcatttttgacccaggtcaggcactgccgctgttcaacggccccgaactgcgcgagtttatcgaacaggcggactatgtggtggtcaacgattacgaaagcaatcttcttcaaacgcgtactggctggaacgagcaggacattgtttcacgcgtgcaggcgtatatcaccacgcaaggttcggctggagccctggtacatacaccggagaagacctacgatattccgccggctcacacccgtcgtgtcgttgatccaactggttgcggcgacgcgtttcgcgccggcctgatctatggtattcagcataattatgattggttgaccattggccgcatgggaaacttaatgggtgcgctgaaagtggaacaccctggcacccaaaatcagcgtttcgattttgccgaattcaacgaccagttcaaacaatattttggctacgcgctc

SEQ ID NO: 1026 - protein, 321 aa, synthetic construct
  REGION 1..321: note = Variant of adenosine kinase
MHHHHHHGGSGMSALICGSLAYDTIMVFPDQFKNHILPDRVHRLNVSFLVPRMRREFGGCAGNIAYNLHLLGGAPIVMATVGQDFGPYREHFETLGIDLSRVKIIDDLSTPQAFITTDMDHNQITAFHGGAMMRSYENHVRDVPGVTLGLVGPDGREGMIQNAEEFAVGGIPFIFDPGQALPLFNGPELREFIEQADYVVVNDYESNLLQTRTGWNEQDIVSRVQAYITTQGSAGALVHTPEKTYDIPPAHTRRVVDPTGCGDAFRAGLIYGIQHNYDWLTIGRMGNLMGALKVEHPGTQNQRFDFAEFNDQFKQYFGYAL

SEQ ID NO: 1027 - DNA, 963 bp, synthetic construct
  misc_feature 1..963: note = Variant of adenosine kinase
  source 1..963: mol_type = other DNA
atgcaccatcatcaccatcacgggggctccggcatgagtgcactgatttgcggttctttagcgtatgataccatcatggtgtttccggaccagttcaagaaccatattctgcccgatcgtgttcaccgcctcaatgtcagctttcttgtaccacgcatgcgtcgtgaatttggaggctgtgccggcaacattgcgtacaatctgcatctgttgggtggtgctccgatcgtaatggctacggtgggccaagatttcggtccgtatcgcgagcacttcgaaactctgggcattgacttatcccgcgtcaagatcatcgatgatctgagtacaccgcaggccttcattaccaccgacatggatcataaccagattacggcgtttcatggcggcgcaatgatgcgttcgtacgaaaatcacgttcgtgatgtgccgggtgttaccttgggcctcgtaggtcctgatggacgcgagggcatgatccaaaatgccgaagaatttgctcggggtggcattccgttcatttttgacccaggtcaggcactgccgctgttcaacggccccgaactgcgcgagtttatcgaacaggcggactatgtggtggtcaacgattacgaaagcaatcttcttcaaacgcgtactggctggaacgagcaggacattgtttcacgcgtgcaggcgtatatcaccacgcaaggttcggctggagccctggtacatacaccggagaagacctacgatattccgccggctcacacccgtcgtgtcgttgatccaactggttgcggcgacgcgtttcgcgccggcctgatctatggtattcagcataattatgattggttgaccattggccgcatgggaaacttaatgggtgcgctgaaagtggaacaccctggcacccaaaatcagcgtttcgattttgccgaattcaacgaccagttcaaacaatattttggctacgcgctc

SEQ ID NO: 1028 - protein, 321 aa, synthetic construct
  REGION 1..321: note = Variant of adenosine kinase
MHHHHHHGGSGMSALICGSLAYDTIMVFPDQFKNHILPDRVHRLNVSFLVPRMRREFGGCAGNIAYNLHLLGGAPIVMATVGQDFGPYREHFETLGIDLSRVKIIDDLSTPQAFITTDMDHNQITAFHGGAMMRSYENHVRDVPGVTLGLVGPDGREGMIQNAEEFARGGIPFIFDPGQALPLFNGPELREFIEQADYVVVNDYESNLLQTRTGWNEQDIVSRVQAYITTQGSAGALVHTPEKTYDIPPAHTRRVVDPTGCGDAFRAGLIYGIQHNYDWLTIGRMGNLMGALKVEHPGTQNQRFDFAEFNDQFKQYFGYAL

SEQ ID NO: 1029 - DNA, 963 bp, synthetic construct
  misc_feature 1..963: note = Variant of adenosine kinase
  source 1..963: mol_type = other DNA
atgcaccatcatcaccatcacgggggctccggcatgagtgcactgatttgcggttctttagcgtatgataccatcatggtgtttccggaccagttcaagaaccatattctgcccgatcgtgttcaccgcctcaatgtcagctttcttgtaccacgcatgcgtcgtgaatttggaggctgtgccggcaacattgcgtacaatctgcatctgttgggtggtgctccgatcgtaatggctacggtgggccaagatttcggtccgtatcgcgagcacttcgaaactctgggcattgacttatcccgcgtcaagatcatcgatgatctgagtacaccgcaggccttcattaccaccgacatggatcataaccagattacggcgtttcatggcggcgcaatgatgcgttcgtacgaaaatcacgttcgtgatgtgccgggtgttaccttgggcctcgtaggtcctgatggacgcgagggcatgatccaaaatgccgaagaatttgctgctggtggcattccgttcatttttgacccaggtcaggcactgccgctgttcaacggccccgaactgcgcgagtttatcgaacaggcggactatgtggtggtcaacgattacgaaagcaatcttcttcaatgtcgtactggctggaacgagcaggacattgtttcacgcgtgcaggcgtatatcaccacgcaaggttcggctggagccctggtacatacaccggagaagacctacgatattccgccggctcacacccgtcgtgtcgttgatccaactggttgcggcgacgcgtttcgcgccggcctgatctatggtattcagcataattatgattggttgaccattggccgcatgggaaacttaatgggtgcgctgaaagtggaacaccctggcacccaaaatcagcgtttcgattttgccgaattcaacgaccagttcaaacaatattttggctacgcgctc

SEQ ID NO: 1030 - protein, 321 aa, synthetic construct
  REGION 1..321: note = Variant of adenosine kinase
MHHHHHHGGSGMSALICGSLAYDTIMVFPDQFKNHILPDRVHRLNVSFLVPRMRREFGGCAGNIAYNLHLLGGAPIVMATVGQDFGPYREHFETLGIDLSRVKIIDDLSTPQAFITTDMDHNQITAFHGGAMMRSYENHVRDVPGVTLGLVGPDGREGMIQNAEEFAAGGIPFIFDPGQALPLFNGPELREFIEQADYVVVNDYESNLLQCRTGWNEQDIVSRVQAYITTQGSAGALVHTPEKTYDIPPAHTRRVVDPTGCGDAFRAGLIYGIQHNYDWLTIGRMGNLMGALKVEHPGTQNQRFDFAEFNDQFKQYFGYAL

SEQ ID NO: 1031 - DNA, 963 bp, synthetic construct
  misc_feature 1..963: note = Variant of adenosine kinase
  source 1..963: mol_type = other DNA
atgcaccatcatcaccatcacgggggctccggcatgagtgcactgatttgcggttctttagcgtatgataccatcatggtgtttccggacctgttcaagaaccatattctgcccgatcgtgttcaccgcctcaatgtcagctttcttgtaccacgcatgcgtcgtgaatttggaggctgtgccggcaacattgcgtacaatctgcatctgttgggtggtgctccgatcgtaatggctacggtgggccaagatttcggtccgtatcgcgagcacttcgaaactctgggcattgacttatcccgcgtcaagatcatcgatgatctgagtacaccgcaggcgttcattaccaccgacatggatcataaccagattacggcgtttcatggcggcgcaatgatgcgttcgtacgaaaatcacgttcgtgatgtgccgggtgttaccttgggcctcgtaggtcctgatggacgcgagggcatgatccaaaatgccgaagaatttgctgctggtggcattccgttcatttttgacccaggtcaggcagtgccgctgttcaacggccccgaactgcgcgagtttatcgaacaggcggactatgtggtggtcaacgattacgaaagcaatcttcttcaagcccgtactggctggaacgagcaggacattgtttcacgcgtgcaggcgtatatcaccacgcaaggttcggctggagccctggtacatacaccggagaagacctacgatattccgccggctcacacccgtcgtgtcgttgatccaactggttgcggcgacgcgtttcgcgccggcctgatctatggtattcagcataattatgattggttgaccattggccgcatgggaaacttaatgggtgcgctgaaactggaacaccctggcacccaaaatcagcgtttcgattttgccgaattcaacgaccagttcaaacaatattttggctacgcgctc

SEQ ID NO: 1032 - protein, 321 aa, synthetic construct
  REGION 1..321: note = Variant of adenosine kinase
MHHHHHHGGSGMSALICGSLAYDTIMVFPDLFKNHILPDRVHRLNVSFLVPRMRREFGGCAGNIAYNLHLLGGAPIVMATVGQDFGPYREHFETLGIDLSRVKIIDDLSTPQAFITTDMDHNQITAFHGGAMMRSYENHVRDVPGVTLGLVGPDGREGMIQNAEEFAAGGIPFIFDPGQAVPLFNGPELREFIEQADYVVVNDYESNLLQARTGWNEQDIVSRVQAYITTQGSAGALVHTPEKTYDIPPAHTRRVVDPTGCGDAFRAGLIYGIQHNYDWLTIGRMGNLMGALKLEHPGTQNQRFDFAEFNDQFKQYFGYAL

SEQ ID NO: 1033 - DNA, 963 bp, synthetic construct
  misc_feature 1..963: note = Variant of adenosine kinase
  source 1..963: mol_type = other DNA
atgcaccatcatcaccatcacgggggctccggcatgagtgcactgatttgcggttctttagcgtatgataccatcatggtgtttccggaccagttcaagaaccatattctgcccgatcgtgttcaccgcctcaatgtcagctttcttgtaccacgcatgcgtcgtgaatttggaggctgtgccggcaacattgcgtacaatctgcatctgttgggtatggctccgatcgtaatggctacggtgggccaagatttcggtccgtatcgcgagcacttcgaaactctgggcattgacttatcccgcgtcaagatcatcgatgatctgagtacaccgcaggccttcattaccaccgacatggatcataaccagattacggcgtttcatggcggcgcaatgatgcgttcgtacgaaaatcacgttcgtgatgtgccgggtgttaccttgggcctcgtaggtcctgatggacgcgagggcatgatccaaaatgccgaagaatttgctgctggtggcattccgttcatttttgacccaggtcaggcactgccgctgttcaacggccccgaactgcgcgagtttatcgaacaggcggactatgtggtggtcaacgattacgaaagcaatcttcttcaaacgcgtactggctggaacgagcaggacattgtttcacgcgtgcaggcgtatatcaccacgcaaggttcggctggagccctggtacatacaccggagaagacctacgatattccgccggctcacacccgtcgtgtcgttgatccaactggttgcggcgacgcgtttcgcgccggcctgatctatggtattcagcataattatgattggttgaccattggccgcatgggaaacttaatgggtgcgctgaaagtggaacaccctggcacccaaaatcagcgtttcgattttgccgaattcaacgaccagttcaaacaatattttggctacgcgctc

SEQ ID NO: 1034 - protein, 321 aa, synthetic construct
  REGION 1..321: note = Variant of adenosine kinase
MHHHHHHGGSGMSALICGSLAYDTIMVFPDQFKNHILPDRVHRLNVSFLVPRMRREFGGCAGNIAYNLHLLGMAPIVMATVGQDFGPYREHFETLGIDLSRVKIIDDLSTPQAFITTDMDHNQITAFHGGAMMRSYENHVRDVPGVTLGLVGPDGREGMIQNAEEFAAGGIPFIFDPGQALPLFNGPELREFIEQADYVVVNDYESNLLQTRTGWNEQDIVSRVQAYITTQGSAGALVHTPEKTYDIPPAHTRRVVDPTGCGDAFRAGLIYGIQHNYDWLTIGRMGNLMGALKVEHPGTQNQRFDFAEFNDQFKQYFGYAL

SEQ ID NO: 1035 - DNA, 963 bp, synthetic construct
  misc_feature 1..963: note = Variant of adenosine kinase
  source 1..963: mol_type = other DNA
atgcaccatcatcaccatcacgggggctccggcatgagtgcactgatttgcggttctttagcgtatgataccatcatggtgtttccggaccagttcaagaaccatattctgcccgatcgtgttcaccgcctcaatgtcagctttcttgtaccacgcatgcgtcgtgaatttggaggctgtgccggcaacattgcgtacaatctgcatctgttgggtggtgctccgatcgtaatggctacggtgggccaagatttcggtccgtatcgcgagcacttcgaaactctgggcattgacttatcccgcgtcaagatcatcgatgatctgagtacaccgcaggccttcattaccaccgacatggatcataaccagattacggcgtttcatggcggcgcaatgatgcgttcgtacgaaaatcacgttcgtgatgtgccgggtgttaccttgggcctcgtaggtcctgatggacgcgagggcatgatccaaaatgccgaagaatttgctgctggtggcattccgttcatttttgacccaggtcaggcactgccgctgttcaacggccccgaactgcgcgagtttatcgaacaggcggactatgtggtggtcaacgattacgaaagcaatcttcttcaaacgcgtactggctggaacgagcaggacattgtttcacgcgtgcaggcgtatatcaccacgcaaggttcggctggagccctggtacatacaccggagaagacctacgatattccgccggctcacacccgtcgtgtcgttgatccaactggttgcggcgacgcgtttcgcgccggcctgatctatggtattcagcattcttatgattggttgaccattggccgcatgggaaacttaatgggtgcgctgaaagtggaacaccctggcacccaaaatcagcgtttcgattttgccgaattcaacgaccagttcaaacaatattttggctacgcgctc

SEQ ID NO: 1036 - protein, 321 aa, synthetic construct
  REGION 1..321: note = Variant of adenosine kinase
MHHHHHHGGSGMSALICGSLAYDTIMVFPDQFKNHILPDRVHRLNVSFLVPRMRREFGGCAGNIAYNLHLLGGAPIVMATVGQDFGPYREHFETLGIDLSRVKIIDDLSTPQAFITTDMDHNQITAFHGGAMMRSYENHVRDVPGVTLGLVGPDGREGMIQNAEEFAAGGIPFIFDPGQALPLFNGPELREFIEQADYVVVNDYESNLLQTRTGWNEQDIVSRVQAYITTQGSAGALVHTPEKTYDIPPAHTRRVVDPTGCGDAFRAGLIYGIQHSYDWLTIGRMGNLMGALKVEHPGTQNQRFDFAEFNDQFKQYFGYAL

SEQ ID NO: 1037 - DNA, 963 bp, synthetic construct
  misc_feature 1..963: note = Variant of adenosine kinase
  source 1..963: mol_type = other DNA
atgcaccatcatcaccatcacgggggctccggcatgagtgcactgatttgcggttctttagcgtatgataccatcatggtgtttccggaccagttcaagaaccatattctgcccgatcgtgttcaccgcctcaatgtcagctttcttgtaccacgcatgcgtcgtgaatttggaggctgtgccggcaacattgcgtacaatctgcatctgttgggtggtgttccgatcgtaatggctacggtgggccaagatttcggtccgtatcgcgagcacttcgaaactctgggcattgacttatcccgcgtcaagatcatcgatgatctgagtacaccgcaggccttcattaccaccgacatggatcataaccagattacggcgtttcatggcggcgcaatgatgcgttcgtacgaaaatcacgttcgtgatgtgccgggtgttaccttgggcctcgtaggtcctgatggacgcgagggcatgatccaaaatgccgaagaatttgctgctggtggcattccgttcatttttgacccaggtcaggcactgccgctgttcaacggccccgaactgcgcgagtttatcgaacaggcggactatgtggtggtcaacgattacgaaagcaatcttcttcaaacgcgtactggctggaacgagcaggacattgtttcacgcgtgcaggcgtatatcaccacgcaaggttcggctggagccctggtacatacaccggagaagacctacgatattccgccggctcacacccgtcgtgtcgttgatccaactggttgcggcgacgcgtttcgcgccggcctgatctatggtattcagcataattatgattggttgaccattggccgcatgggaaacttaatgggtgcgctgaaagtggaacaccctggcacccaaaatcagcgtttcgattttgccgaattcaacgaccagttcaaacaatattttggctacgcgctc

SEQ ID NO: 1038 - protein, 321 aa, synthetic construct
  REGION 1..321: note = Variant of adenosine kinase
MHHHHHHGGSGMSALICGSLAYDTIMVFPDQFKNHILPDRVHRLNVSFLVPRMRREFGGCAGNIAYNLHLLGGVPIVMATVGQDFGPYREHFETLGIDLSRVKIIDDLSTPQAFITTDMDHNQITAFHGGAMMRSYENHVRDVPGVTLGLVGPDGREGMIQNAEEFAAGGIPFIFDPGQALPLFNGPELREFIEQADYVVVNDYESNLLQTRTGWNEQDIVSRVQAYITTQGSAGALVHTPEKTYDIPPAHTRRVVDPTGCGDAFRAGLIYGIQHNYDWLTIGRMGNLMGALKVEHPGTQNQRFDFAEFNDQFKQYFGYAL

SEQ ID NO: 1039 - DNA, 963 bp, synthetic construct
  misc_feature 1..963: note = Variant of adenosine kinase
  source 1..963: mol_type = other DNA
atgcaccatcatcaccatcacgggggctccggcatgagtgcactgatttgcggttctttagcgtatgataccatcatggtgtttccggaccagttcaagaaccatattctgcccgatcgtgttcaccgcctcaatgtcagctttcttgtaccacgcatgcgtcgtgaatttggaggctgtgccggcaacattgcgtacaatctgcatctgttgggtggtgctccgatcgtaatggctacggtgggccaagatttcggtccgtatcgcgagcacttcgaaactctgggcattgacttatcccgcgtcaagatcatcgatgatctgagtacaccgcaggccttcattaccaccgacatggatcataaccagattacggcgtttcatggcggcgcaatgatgcgttcgtacgaaaatcacgttcgtgatgtgccgggtgttaccttgggcctcgtaggtcctgatggacgcgagggcatgatccaaaatgcctctgaatttgctgctggtggcattccgttcatttttgacccaggtcaggcactgccgctgttcaacggccccgaactgcgcgagtttatcgaacaggcggactatgtggtggtcaacgattacgaaagcaatcttcttcaaacgcgtactggctggaacgagcaggacattgtttcacgcgtgcaggcgtatatcaccacgcaaggttcggctggagccctggtacatacaccggagaagacctacgatattccgccggctcacacccgtcgtgtcgttgatccaactggttgcggcgacgcgtttcgcgccggcctgatctatggtattcagcataattatgattggttgaccattggccgcatgggaaacttaatgggtgcgctgaaagtggaacaccctggcacccaaaatcagcgtttcgattttgccgaattcaacgaccagttcaaacaatattttggctacgcgctc

SEQ ID NO: 1040 - protein, 321 aa, synthetic construct
  REGION 1..321: note = Variant of adenosine kinase
MHHHHHHGGSGMSALICGSLAYDTIMVFPDQFKNHILPDRVHRLNVSFLVPRMRREFGGCAGNIAYNLHLLGGAPIVMATVGQDFGPYREHFETLGIDLSRVKIIDDLSTPQAFITTDMDHNQITAFHGGAMMRSYENHVRDVPGVTLGLVGPDGREGMIQNASEFAAGGIPFIFDPGQALPLFNGPELREFIEQADYVVVNDYESNLLQTRTGWNEQDIVSRVQAYITTQGSAGALVHTPEKTYDIPPAHTRRVVDPTGCGDAFRAGLIYGIQHNYDWLTIGRMGNLMGALKVEHPGTQNQRFDFAEFNDQFKQYFGYAL

SEQ ID NO: 1041 - DNA, 963 bp, synthetic construct
  misc_feature 1..963: note = Variant of adenosine kinase
  source 1..963: mol_type = other DNA
atgcaccatcatcaccatcacgggggctccggcatgagtgcactgatttgcggttctttagcgtatgataccatcatggtgtttccggacctgttcaagaaccatattctgcccgatcgtgttcaccgcctcaatgtcagctttcttgtaccacgcatgcgtcgtgaatttggaggctgtgccggcaacattgcgtacaatctgcatctgttgggtggtgctccgatcgtaatggctacggtgggccaagatttcggtccgtatcgcgagcacttcgaaactctgggcattgacttatcccgcgtcaagatcatcgatgatctgagtacaccgcaggccttcattaccaccgacatggatcataaccagattacggcgtttcacggcggcgcaatgatgcgttcgtacgaaaatcacgttcgtgatgtgccgggtgttaccttgggcctcgtaggtcctgatggacgcgagggcatgatccaaaatgccgaagaatttgctgctggtggcattccgttcatttttgacccaggtcaggcactgccgctgttcaacggccccgaactgcgcgagtttatcgaacaggcggactatgtggtggtcaacgattacgaaagcaatcttcttcaaacgcgtactggctggaacgagcaggacattgtttcacgcgtgcaggcgtatatcaccacgcaaggttcggctggagccctggtacatacaccggagaagacctacgatattccgccggctaaaacccgtcgtgtcgttgatccaactggttgcggcgacgcgtttcgcgccggcctgatctatggtattcagcataattatgattggttgaccattggccgcatgggaaacttaatgggtgcgctgaaagtggaacaccctggcacccaaaatcagcgtttcgattttgccgaattcaacgaccagttcaaacaatattttggctacgcgctc

SEQ ID NO: 1042 - protein, 321 aa, synthetic construct
  REGION 1..321: note = Variant of adenosine kinase
MHHHHHHGGSGMSALICGSLAYDTIMVFPDLFKNHILPDRVHRLNVSFLVPRMRREFGGCAGNIAYNLHLLGGAPIVMATVGQDFGPYREHFETLGIDLSRVKIIDDLSTPQAFITTDMDHNQITAFHGGAMMRSYENHVRDVPGVTLGLVGPDGREGMIQNAEEFAAGGIPFIFDPGQALPLFNGPELREFIEQADYVVVNDYESNLLQTRTGWNEQDIVSRVQAYITTQGSAGALVHTPEKTYDIPPAKTRRVVDPTGCGDAFRAGLIYGIQHNYDWLTIGRMGNLMGALKVEHPGTQNQRFDFAEFNDQFKQYFGYAL

SEQ ID NO: 1043 - DNA, 963 bp, synthetic construct
  misc_feature 1..963: note = Variant of adenosine kinase
  source 1..963: mol_type = other DNA
atgcaccatcatcaccatcacgggggctccggcatgagtgcactgatttgcggttctttagcgtatgataccatcatggtgtttccggaccagttcaagaaccatattctgcccgatcgtgttcaccgcctcaatgtcagctttcttgtaccacgcatgcgtcgtgaatttggaggctgtgccggcaacattgcgtacaatctgcatctgttgggtggtgctccgatcgtaatggctacggtgggccaagatttcggtccgtatcgcgagcacttcgaaactctgggcattgacttatcccgcgtcaagatcatcgatgatctgagtacaccgcaggccttcattaccaccgacatggatcataaccagattacggcgtttcatggcggcgcaatgatgcgttcgtacgaaaatcacgttcgtgatgtgccgggtgttaccttgggcctcgtaggtcctgatggacgcgagggcatgatccaaaatgccgaagaatttgctgctagtggcattccgttcatttttgacccaggtcaggcactgccgctgttcaacggccccgaactgcgcgagtttatcgaacaggcggactatgtggtggtcaacgattacgaaagcaatcttcttcaaacgcgtactggctggaacgagcaggacattgtttcacgcgtgcaggcgtatatcaccacgcaaggttcggctggagccctggtacatacaccggagaagacctacgatattccgccggctcacacccgtcgtgtcgttgatccaactggttgcggcgacgcgtttcgcgccggcctgatctatggtattcagcataattatgattggttgaccattggccgcatgggaaacttaatgggtgcgctgaaagtggaacaccctggcacccaaaatcagcgtttcgattttgccgaattcaacgaccagttcaaacaatattttggctacgcgctc

SEQ ID NO: 1044 - protein, 321 aa, synthetic construct
  REGION 1..321: note = Variant of adenosine kinase
MHHHHHHGGSGMSALICGSLAYDTIMVFPDQFKNHILPDRVHRLNVSFLVPRMRREFGGCAGNIAYNLHLLGGAPIVMATVGQDFGPYREHFETLGIDLSRVKIIDDLSTPQAFITTDMDHNQITAFHGGAMMRSYENHVRDVPGVTLGLVGPDGREGMIQNAEEFAASGIPFIFDPGQALPLFNGPELREFIEQADYVVVNDYESNLLQTRTGWNEQDIVSRVQAYITTQGSAGALVHTPEKTYDIPPAHTRRVVDPTGCGDAFRAGLIYGIQHNYDWLTIGRMGNLMGALKVEHPGTQNQRFDFAEFNDQFKQYFGYAL

SEQ ID NO: 1045 - DNA, 963 bp, synthetic construct
  misc_feature 1..963: note = Variant of adenosine kinase
  source 1..963: mol_type = other DNA
atgcaccatcatcaccatcacgggggctccggcatgagtgcactgatttgcggttctttagcgtatgataccatcatggtgtttccggacctgttcaagaaccatattctgcccgatcgtgttcaccgcctcaatgtcagctttcttgtaccacgcatgcgtcgtgaatttggaggctgtgccggcaacattgcgtacaatctgcatctgttgggtggtgctccgatcgtaatggctacggtgggccaagatttcggtccgtatcgcgagcacttcgaaactctgggcattgacttatcccgcgtcaagatcatcgatgatctgagtacaccgcaggccttcattaccaccgacatggatcataaccagattacggcgtttcatggcggcgcaatgatgcgttcgtacgaaaatcacgttcgtgatgtgccgggtgttaccttgggcctcgtaggtcctgatggacgcgagggcatgatccaaaatgccgaagaatttgctgctggtggcattccgttcatttttgacccaggtcaggcactgccgctgttcaacggccccgaactgcgcgagtttatcgaacaggcggactatgtggtggtcaacgattacgaaagcaatcttcttcaaacgcgtactggctggaacgagcaggacattgtttcacgcgtgcaggcgtatatcaccacgcaaggttcggctggagccctggtacatacaccggagaagacctacgatattccgccggctcacacccgtcgtgtcgttgatccaactggttgcggcgacgcgtttcgcgccggcctgatctatggtattcagcataattatgattggttgaccattggccgcatgggaaacttaatgggtgcgctgaaagtggaacaccctggcacccaaaatcagcgtttcgattttgccgaattcaacgaccagttcaaacaatattttggctacgcgctc

SEQ ID NO: 1046 - protein, 321 aa, synthetic construct
  REGION 1..321: note = Variant of adenosine kinase
MHHHHHHGGSGMSALICGSLAYDTIMVFPDLFKNHILPDRVHRLNVSFLVPRMRREFGGCAGNIAYNLHLLGGAPIVMATVGQDFGPYREHFETLGIDLSRVKIIDDLSTPQAFITTDMDHNQITAFHGGAMMRSYENHVRDVPGVTLGLVGPDGREGMIQNAEEFAAGGIPFIFDPGQALPLFNGPELREFIEQADYVVVNDYESNLLQTRTGWNEQDIVSRVQAYITTQGSAGALVHTPEKTYDIPPAHTRRVVDPTGCGDAFRAGLIYGIQHNYDWLTIGRMGNLMGALKVEHPGTQNQRFDFAEFNDQFKQYFGYAL

SEQ ID NO: 1047 - DNA, 963 bp, synthetic construct
  misc_feature 1..963: note = Variant of adenosine kinase
  source 1..963: mol_type = other DNA
atgcaccatcatcaccatcacgggggctccggcatgagtgcactgatttgcggttctttagcgtatgataccatcatggtgtttccggaccagttcaagaaccatattctgcccgatcgtgttcaccgcctcaatgtcagctttcttgtaccacgcatgcgtcgtgaatttggaggctgtgccggcaacattgcgtacaatctgcatctgttgggtggtgctccgatcgtaatggctacggtgggccaagatttcggtccgtatcgcgagcacttcgaaactctgggcattgacttatcccgcgtcaagatcatcgatgatctgagtacaccgcaggccttcattaccaccgacatggatcataaccagattacggcgtttcatggcggcgcaatgatgcgttcgtacgaaaatcacgttcgtgatgtgccgggtgttaccttgggcctcgtaggtcctgatggacgcgagggcatgatccaaaatgccgaagaatttgctgctgatggcattccgttcatttttgacccaggtcaggcactgccgctgttcaacggccccgaactgcgcgagtttatcgaacaggcggactatgtggtggtcaacgattacgaaagcaatcttcttcaaacgcgtactggctggaacgagcaggacattgtttcacgcgtgcaggcgtatatcaccacgcaaggttcggctggagccctggtacatacaccggagaagacctacgatattccgccggctcacacccgtcgtgtcgttgatccaactggttgcggcgacgcgtttcgcgccggcctgatctatggtattcagcataattatgattggttgaccattggccgcatgggaaacttaatgggtgcgctgaaagtggaacaccctggcacccaaaatcagcgtttcgattttgccgaattcaacgaccagttcaaacaatattttggctacgcgctc

SEQ ID NO: 1048 - protein, 321 aa, synthetic construct
  REGION 1..321: note = Variant of adenosine kinase
MHHHHHHGGSGMSALICGSLAYDTIMVFPDQFKNHILPDRVHRLNVSFLVPRMRREFGGCAGNIAYNLHLLGGAPIVMATVGQDFGPYREHFETLGIDLSRVKIIDDLSTPQAFITTDMDHNQITAFHGGAMMRSYENHVRDVPGVTLGLVGPDGREGMIQNAEEFAADGIPFIFDPGQALPLFNGPELREFIEQADYVVVNDYESNLLQTRTGWNEQDIVSRVQAYITTQGSAGALVHTPEKTYDIPPAHTRRVVDPTGCGDAFRAGLIYGIQHNYDWLTIGRMGNLMGALKVEHPGTQNQRFDFAEFNDQFKQYFGYAL

SEQ ID NO: 1049 - DNA, 963 bp, synthetic construct
  misc_feature 1..963: note = Variant of adenosine kinase
  source 1..963: mol_type = other DNA
atgcaccatcatcaccatcacgggggctccggcatgagtgcactgatttgcggttctttagcgtatgataccatcatggtgtttccggaccagttcaagaaccatattctgcccgatcgtgttcaccgcctcaatgtcagctttcttgtaccacgcatgcgtcgtgaatttggaggctgtgccggcaacattgcgtacaatctgcatctgttgggtggtgctccgatcgtaatggctacggtgggccaagatttcggtccgtatcgcgagcacttcgaaactctgggcattgacttatcccgcgtcaagatcatcgatgatctgagtacaccgcaggccttcattaccaccgacatggatcataaccagattacggcgtttcatggcggcgcaatgatgcgttcgtacgaaaatcacgttcgtgatgtgccgggtgttaccttgggcctcgtaggtcctgatggacgcgagggcatgatccaaaatgccgaagaatttgctgctggtggcattccgttcatttttgacccaggtcaggcactgccgctgttcaacggccccgaactgcgcgagtttatcgaacagagtgactatgtggtggtcaacgattacgaaagcaatcttcttcaaacgcgtactggctggaacgagcaggacattgtttcacgcgtgcaggcgtatatcaccacgcaaggttcggctggagccctggtacatacaccggagaagacctacgatattccgccggctcacacccgtcgtgtcgttgatccaactggttgcggcgacgcgtttcgcgccggcctgatctatggtattcagcataattatgattggttgaccattggccgcatgggaaacttaatgggtgcgctgaaagtggaacaccctggcacccaaaatcagcgtttcgattttgccgaattcaacgaccagttcaaacaatattttggctacgcgctc

SEQ ID NO: 1050 - protein, 321 aa, synthetic construct
  REGION 1..321: note = Variant of adenosine kinase
MHHHHHHGGSGMSALICGSLAYDTIMVFPDQFKNHILPDRVHRLNVSFLVPRMRREFGGCAGNIAYNLHLLGGAPIVMATVGQDFGPYREHFETLGIDLSRVKIIDDLSTPQAFITTDMDHNQITAFHGGAMMRSYENHVRDVPGVTLGLVGPDGREGMIQNAEEFAAGGIPFIFDPGQALPLFNGPELREFIEQSDYVVVNDYESNLLQTRTGWNEQDIVSRVQAYITTQGSAGALVHTPEKTYDIPPAHTRRVVDPTGCGDAFRAGLIYGIQHNYDWLTIGRMGNLMGALKVEHPGTQNQRFDFAEFNDQFKQYFGYAL

SEQ ID NO: 1051 - DNA, 963 bp, synthetic construct
  misc_feature 1..963: note = Variant of adenosine kinase
  source 1..963: mol_type = other DNA
atgcaccatcatcaccatcacgggggctccggcatgagtgcactgatttgcggttctttagcgtatgataccatcatggtgtttccggaccagttcaagaaccatattctgcccgatcgtgttcaccgcctcaatgtcagctttcttgtaccatgtatgcgtcgtgaatttggaggctgtgccggcaacattgcgtacaatctgcatctgttgggtggtgctccgatcgtaatggctacggtgggccaagatttcggtccgtatcgcgagcacttcgaaactctgggcattgacttatcccgcgtcaagatcatcgatgatctgagtacaccgcaggccttcattaccaccgacatggatcataaccagattacggcgtttcatggcggcgcaatgatgcgttcgtacgaaaatcacgttcgtgatgtgccgggtgttaccttgggcctcgtaggtcctgatggacgcgagggcatgatccaaaatgccgaagaatttgctgctggtggcattccgttcatttttgacccaggtcaggcactgccgctgttcaacggccccgaactgcgcgagtttatcgaacaggcggactatgtggtggtcaacgattacgaaagcaatcttcttcaaacgcgtactggctggaacgagcaggacattgtttcacgcgtgcaggcgtatatcaccacgcaaggttcggctggagccctggtacatacaccggagaagacctacgatattccgccggctcacacccgtcgtgtcgttgatccaactggttgcggcgacgcgtttcgcgccggcctgatctatggtattcagcataattatgattggttgaccattggccgcatgggaaacttaatgggtgcgctgaaagtggaacaccctggcacccaaaatcagcgtttcgattttgccgaattcaacgaccagttcaaacaatattttggctacgcgctc

SEQ ID NO: 1052 - protein, 321 aa, synthetic construct
  REGION 1..321: note = Variant of adenosine kinase
MHHHHHHGGSGMSALICGSLAYDTIMVFPDQFKNHILPDRVHRLNVSFLVPCMRREFGGCAGNIAYNLHLLGGAPIVMATVGQDFGPYREHFETLGIDLSRVKIIDDLSTPQAFITTDMDHNQITAFHGGAMMRSYENHVRDVPGVTLGLVGPDGREGMIQNAEEFAAGGIPFIFDPGQALPLFNGPELREFIEQADYVVVNDYESNLLQTRTGWNEQDIVSRVQAYITTQGSAGALVHTPEKTYDIPPAHTRRVVDPTGCGDAFRAGLIYGIQHNYDWLTIGRMGNLMGALKVEHPGTQNQRFDFAEFNDQFKQYFGYAL

SEQ ID NO: 1053 - DNA, 963 bp, synthetic construct
  misc_feature 1..963: note = Variant of adenosine kinase
  source 1..963: mol_type = other DNA
atgcaccatcatcaccatcacgggggctccggcatgagtgcactgatttgcggttctttagcgtatgataccatcatggtgtttccggaccagttcaagaaccatattctgcccgatcgtgttcaccgcctcaatgtcagctttcttgtaccacgcatgcgtcgtgaatttggaggctgtgccggcaacattgcgtacaatctgcatctgttgggtggtgctccgatcgtaatggctacggtgggccaagatttcggtccgtatcgcgagcacttcgaaactctgggcattgacttatcccgcgtcaagatcatcgatgatctgagtacaccgcaggccttcattaccaccgacatggatcataaccagattacggcgtttcatggcggcgcaatgatgcgttcgtacgaaaatcacgttcgtgatgtgccgggtgttaccttgggcctcgtaggtcctgatggacgcgagggcatgatccaaaatgccgaagaatttgctgctggtggcattccgttcatttttgacccaggtcaggcactgccgctgttcaacggccccgaactgcgcgagtttatcgaacaggcggactatgtggtggtcaacgattacgaaagcaatcttcttcaaacgcgtactggctggaacgagctggacattgtttcacgcgtgcaggcgtatatcaccacgcaaggttcggctggagccctggtacatacaccggagaagacctacgatattccgccggctcacacccgtcgtgtcgttgatccaactggttgcggcgacgcgtttcgcgccggcctgatctatggtattcagcataattatgattggttgaccattggccgcatgggaaacttaatgggtgcgctgaaagtggaacaccctggcacccaaaatcagcgtttcgattttgccgaattcaacgaccagttcaaacaatattttggctacgcgctc

SEQ ID NO: 1054 - protein, 321 aa, synthetic construct
  REGION 1..321: note = Variant of adenosine kinase
MHHHHHHGGSGMSALICGSLAYDTIMVFPDQFKNHILPDRVHRLNVSFLVPRMRREFGGCAGNIAYNLHLLGGAPIVMATVGQDFGPYREHFETLGIDLSRVKIIDDLSTPQAFITTDMDHNQITAFHGGAMMRSYENHVRDVPGVTLGLVGPDGREGMIQNAEEFAAGGIPFIFDPGQALPLFNGPELREFIEQADYVVVNDYESNLLQTRTGWNELDIVSRVQAYITTQGSAGALVHTPEKTYDIPPAHTRRVVDPTGCGDAFRAGLIYGIQHNYDWLTIGRMGNLMGALKVEHPGTQNQRFDFAEFNDQFKQYFGYAL

SEQ ID NO: 1055 - DNA, 963 bp, synthetic construct
  misc_feature 1..963: note = Variant of adenosine kinase
  source 1..963: mol_type = other DNA
atgcaccatcatcaccatcacgggggctccggcatgagtgcactgatttgcggttctttagcgtatgataccatcatggtgtttccggaccagttcaagaaccatattctgcccgatcgtgttcaccgcctcaatgtcagctttcttgtaccacgcatgcgtcgtgaatttggaggctgtgccggcaacattgcgtacaatctgcatctgttgggtggtgctccgatcgtaatggctacggtgggccaagatttcggtccgtatcgcgagcacttcgaaactctgggcattgacttatcccgcgtcaagatcatcgatgatctgagtacaccgcaggccttcattaccaccgacatggatcataaccagattacggcgtttcatggcggcgcaatgatgcgttcgtacgaaaatcacgttcgtgatgtgccgggtgttaccttgggcctcgtaggtcctgatggacgcgagggcatgatccaaaatgccgaagaatttgctgcttgtggcattccgttcatttttgacccaggtcaggcactgccgctgttcaacggccccgaactgcgcgagtttatcgaacaggcggactatgtggtggtcaacgattacgaaagcaatcttcttcaaacgcgtactggctggaacgagcaggacattgtttcacgcgtgcaggcgtatatcaccacgcaaggttcggctggagccctggtacatacaccggagaagacctacgatattccgccggctcacacccgtcgtgtcgttgatccaactggttgcggcgacgcgtttcgcgccggcctgatctatggtattcagcataattatgattggttgaccattggccgcatgggaaacttaatgggtgcgctgaaagtggaacaccctggcacccaaaatcagcgtttcgattttgccgaattcaacgaccagttcaaacaatattttggctacgcgctc

SEQ ID NO: 1056 - protein, 321 aa, synthetic construct
  REGION 1..321: note = Variant of adenosine kinase
MHHHHHHGGSGMSALICGSLAYDTIMVFPDQFKNHILPDRVHRLNVSFLVPRMRREFGGCAGNIAYNLHLLGGAPIVMATVGQDFGPYREHFETLGIDLSRVKIIDDLSTPQAFITTDMDHNQITAFHGGAMMRSYENHVRDVPGVTLGLVGPDGREGMIQNAEEFAACGIPFIFDPGQALPLFNGPELREFIEQADYVVVNDYESNLLQTRTGWNEQDIVSRVQAYITTQGSAGALVHTPEKTYDIPPAHTRRVVDPTGCGDAFRAGLIYGIQHNYDWLTIGRMGNLMGALKVEHPGTQNQRFDFAEFNDQFKQYFGYAL

SEQ ID NO: 1057 - DNA, 963 bp, synthetic construct
  misc_feature 1..963: note = Variant of adenosine kinase
  source 1..963: mol_type = other DNA
atgcaccatcatcaccatcacgggggctccggcatgagtgcactgatttgcggttctttagcgtatgataccatcatggtgtttccggaccagttcaagaaccatattctgcccgatcgtgttcaccgcctcaatgtcagctttcttgtaccacgcatgcgtcgtgaatttggaggctgtgccggcaacattgcgtacaatctgcatctgttgggtggtgctccgatcgtaatggctacggtgggccaagatttcggtccgtatggtgagcacttcgaaactctgggcattgacttatcccgcgtcaagatcatcgatgatctgagtacaccgcaggccttcattaccaccgacatggatcataaccagattacggcgtttcatggcggcgcaatgatgcgttcgtacgaaaatcacgttcgtgatgtgccgggtgttaccttgggcctcgtaggtcctgatggacgcgagggcatgatccaaaatgccgaagaatttgctgctggtggcattccgttcatttttgacccaggtcaggcactgccgctgttcaacggccccgaactgcgcgagtttatcgaacaggcggactatgtggtggtcaacgattacgaaagcaatcttcttcaaacgcgtactggctggaacgagcaggacattgtttcacgcgtgcaggcgtatatcaccacgcaaggttcggctggagccctggtacatacaccggagaagacctacgatattccgccggctcacacccgtcgtgtcgttgatccaactggttgcggcgacgcgtttcgcgccggcctgatctatggtattcagcataattatgattggttgaccattggccgcatgggaaacttaatgggtgcgctgaaagtggaacaccctggcacccaaaatcagcgtttcgattttgccgaattcaacgaccagttcaaacaatattttggctacgcgctc

SEQ ID NO: 1058 - protein, 321 aa, synthetic construct
  REGION 1..321: note = Variant of adenosine kinase
MHHHHHHGGSGMSALICGSLAYDTIMVFPDQFKNHILPDRVHRLNVSFLVPRMRREFGGCAGNIAYNLHLLGGAPIVMATVGQDFGPYGEHFETLGIDLSRVKIIDDLSTPQAFITTDMDHNQITAFHGGAMMRSYENHVRDVPGVTLGLVGPDGREGMIQNAEEFAAGGIPFIFDPGQALPLFNGPELREFIEQADYVVVNDYESNLLQTRTGWNEQDIVSRVQAYITTQGSAGALVHTPEKTYDIPPAHTRRVVDPTGCGDAFRAGLIYGIQHNYDWLTIGRMGNLMGALKVEHPGTQNQRFDFAEFNDQFKQYFGYAL

SEQ ID NO: 1059 - DNA, 963 bp, synthetic construct
  misc_feature 1..963: note = Variant of adenosine kinase
  source 1..963: mol_type = other DNA
atgcaccatcatcaccatcacgggggctccggcatgagtgcactgatttgcggttctttagcgtatgataccatcatggtgtttccggaccagttcaagaaccatattctgcccgatcgtgttcaccgcctcaatgtcagctttcttgtaccacgcatgcgtcgtgaatttggaggctgtgccggcaacattgcgtacaatctgcatctgttgggtggtgctccgatcgtaatggctacggtgggccaagatttcggtccgtatcgccggcacttcgaaactctgggcattgacttatcccgcgtcaagatcatcgatgatctgagtacaccgcaggccttcattaccaccgacatggatcataaccagattacggcgtttcatggcggcgcaatgatgcgttcgtacgaaaatcacgttcgtgatgtgccgggtgttaccttgggcctcgtaggtcctgatggacgcgagggcatgatccaaaatgccgaagaatttgctgctggtggcattccgttcatttttgacccaggtcaggcactgccgctgttcaacggccccgaactgcgcgagtttatcgaacaggcggactatgtggtggtcaacgattacgaaagcaatcttcttcaaacgcgtactggctggaacgagcaggacattgtttcacgcgtgcaggcgtatatcaccacgcaaggttcggctggagccctggtacatacaccggagaagacctacgatattccgccggctcacacccgtcgtgtcgttgatccaactggttgcggcgacgcgtttcgcgccggcctgatctatggtattcagcataattatgattggttgaccattggccgcatgggaaacttaatgggtgcgctgaaagtggaacaccctggcacccaaaatcagcgtttcgattttgccgaattcaacgaccagttcaaacaatattttggctacgcgctc

SEQ ID NO: 1060 - protein, 321 aa, synthetic construct
  REGION 1..321: note = Variant of adenosine kinase
MHHHHHHGGSGMSALICGSLAYDTIMVFPDQFKNHILPDRVHRLNVSFLVPRMRREFGGCAGNIAYNLHLLGGAPIVMATVGQDFGPYRRHFETLGIDLSRVKIIDDLSTPQAFITTDMDHNQITAFHGGAMMRSYENHVRDVPGVTLGLVGPDGREGMIQNAEEFAAGGIPFIFDPGQALPLFNGPELREFIEQADYVVVNDYESNLLQTRTGWNEQDIVSRVQAYITTQGSAGALVHTPEKTYDIPPAHTRRVVDPTGCGDAFRAGLIYGIQHNYDWLTIGRMGNLMGALKVEHPGTQNQRFDFAEFNDQFKQYFGYAL

SEQ ID NO: 1061 - DNA, 963 bp, synthetic construct
  misc_feature 1..963: note = Variant of adenosine kinase
  source 1..963: mol_type = other DNA
atgcaccatcatcaccatcacgggggctccggcatgagtgcactgatttgcggttctttagcgtatgataccatcatggtgtttccggaccagttcaagaaccatattctgcccgatcgtgttcaccgcctcaatgtcagctttcttgtaccacgcatgcgtcgtgaatttggaggctgtgccggcaacattgcgtacaatctgcatctgttgggtgaggctccgatcgtaatggctacggtgggccaagatttcggtccgtatcgcgagcacttcgaaactctgggcattgacttatcccgcgtcaagatcatcgatgatctgagtacaccgcaggccttcattaccaccgacatggatcataaccagattacggcgtttcatggcggcgcaatgatgcgttcgtacgaaaatcacgttcgtgatgtgccgggtgttaccttgggcctcgtaggtcctgatggacgcgagggcatgatccaaaatgccgaagaatttgctgctggtggcattccgttcatttttgacccaggtcaggcactgccgctgttcaacggccccgaactgcgcgagtttatcgaacaggcggactatgtggtggtcaacgattacgaaagcaatcttcttcaaacgcgtactggctggaacgagcaggacattgtttcacgcgtgcaggcgtatatcaccacgcaaggttcggctggagccctggtacatacaccggagaagacctacgatattccgccggctcacacccgtcgtgtcgttgatccaactggttgcggcgacgcgtttcgcgccggcctgatctatggtattcagcataattatgattggttgaccattggccgcatgggaaacttaatgggtgcgctgaaagtggaacaccctggcacccaaaatcagcgtttcgattttgccgaattcaacgaccagttcaaacaatattttggctacgcgctc

SEQ ID NO: 1062 - protein, 321 aa, synthetic construct
  REGION 1..321: note = Variant of adenosine kinase
MHHHHHHGGSGMSALICGSLAYDTIMVFPDQFKNHILPDRVHRLNVSFLVPRMRREFGGCAGNIAYNLHLLGEAPIVMATVGQDFGPYREHFETLGIDLSRVKIIDDLSTPQAFITTDMDHNQITAFHGGAMMRSYENHVRDVPGVTLGLVGPDGREGMIQNAEEFAAGGIPFIFDPGQALPLFNGPELREFIEQADYVVVNDYESNLLQTRTGWNEQDIVSRVQAYITTQGSAGALVHTPEKTYDIPPAHTRRVVDPTGCGDAFRAGLIYGIQHNYDWLTIGRMGNLMGALKVEHPGTQNQRFDFAEFNDQFKQYFGYAL

SEQ ID NO: 1063 - DNA, 963 bp, synthetic construct
  misc_feature 1..963: note = Variant of adenosine kinase
  source 1..963: mol_type = other DNA
atgcaccatcatcaccatcacgggggctccggcatgagtgcactgatttgcggttctttagcgtatgataccatcatggtgtttccggaccagttcaagaaccatattctgcccgatcgtgttcaccgcctcaatgtcagctttcttgtaccacgcatgcgtcgtgaatttggaggctgtgccggcaacattgcgtacaatctgcatctgttgggtggtgctccgatcgtaatggctacggtgggccaagatttcggtccgtatcgcgagcacttcgaaactctgggcattgacttatcccgcgtcaagatcatcgatgatctgagtacaccgcaggccttcattaccaccgacatggatcataaccagattacggcgtttcatggcggcgcaatgatgcgttcgtacgaaaatcacgttcgtgatgtgccgggtgttaccttgggcctcgtaggtcctgatggacgcgagggcatgatccaaaatgccgaagaatttactgctggtggcattccgttcatttttgacccaggtcaggcactgccgctgttcaacggccccgaactgcgcgagtttatcgaacaggcggactatgtggtggtcaacgattacgaaagcaatcttcttcaaacgcgtactggctggaacgagcaggacattgtttcacgcgtgcaggcgtatatcaccacgcaaggttcggctggagccctggtacatacaccggagaagacctacgatattccgccggctcacacccgtcgtgtcgttgatccaactggttgcggcgacgcgtttcgcgccggcctgatctatggtattcagcataattatgattggttgaccattggccgcatgggaaacttaatgggtgcgctgaaagtggaacaccctggcacccaaaatcagcgtttcgattttgccgaattcaacgaccagttcaaacaatattttggctacgcgctc

SEQ ID NO: 1064 - protein, 321 aa, synthetic construct
  REGION 1..321: note = Variant of adenosine kinase
MHHHHHHGGSGMSALICGSLAYDTIMVFPDQFKNHILPDRVHRLNVSFLVPRMRREFGGCAGNIAYNLHLLGGAPIVMATVGQDFGPYREHFETLGIDLSRVKIIDDLSTPQAFITTDMDHNQITAFHGGAMMRSYENHVRDVPGVTLGLVGPDGREGMIQNAEEFTAGGIPFIFDPGQALPLFNGPELREFIEQADYVVVNDYESNLLQTRTGWNEQDIVSRVQAYITTQGSAGALVHTPEKTYDIPPAHTRRVVDPTGCGDAFRAGLIYGIQHNYDWLTIGRMGNLMGALKVEHPGTQNQRFDFAEFNDQFKQYFGYAL

SEQ ID NO: 1065 - DNA, 963 bp, synthetic construct
  misc_feature 1..963: note = Variant of adenosine kinase
  source 1..963: mol_type = other DNA
atgcaccatcatcaccatcacgggggctccggcatgagtgcactgatttgcggttctttagcgtatgataccatcatggtgtttccggaccagttcaagaaccatattctgcccgatcgtgttcaccgcctcaatgtcagctttcttgtaccacgcatgcgtcgtgaatttggaggctgtgccggcaacattgcgtacaatctgcatctgttgggtggtgctccgatcgtaatggctacggtgggccaagatttcggtccgtatcgcgagcacttcgaaactctgggcattgacttatcccgcgtcaagatcatcgatgatctgagtacaccgcaggccttcattaccaccgacatggatcataaccagattacggcgtttcatggcggcgcaatgatgcgttcgtacgaaaatcacgttcgtgatgtgccgggtgttaccttgggcctcgtaggtcctgatggacgcgagggcatgatccaaaatgccgaagaatttgctgctggtggcattccgttcatttttgacccaggtcaggcactgccgctgttcaacggccccgaactgcgcgagtttatcgaacaggcgcgttatgtggtggtcaacgattacgaaagcaatcttcttcaaacgcgtactggctggaacgagcaggacattgtttcacgcgtgcaggcgtatatcaccacgcaaggttcggctggagccctggtacatacaccggagaagacctacgatattccgccggctcacacccgtcgtgtcgttgatccaactggttgcggcgacgcgtttcgcgccggcctgatctatggtattcagcataattatgattggttgaccattggccgcatgggaaacttaatgggtgcgctgaaagtggaacaccctggcacccaaaatcagcgtttcgattttgccgaattcaacgaccagttcaaacaatattttggctacgcgctc

SEQ ID NO: 1066 - protein, 321 aa, synthetic construct
  REGION 1..321: note = Variant of adenosine kinase
MHHHHHHGGSGMSALICGSLAYDTIMVFPDQFKNHILPDRVHRLNVSFLVPRMRREFGGCAGNIAYNLHLLGGAPIVMATVGQDFGPYREHFETLGIDLSRVKIIDDLSTPQAFITTDMDHNQITAFHGGAMMRSYENHVRDVPGVTLGLVGPDGREGMIQNAEEFAAGGIPFIFDPGQALPLFNGPELREFIEQARYVVVNDYESNLLQTRTGWNEQDIVSRVQAYITTQGSAGALVHTPEKTYDIPPAHTRRVVDPTGCGDAFRAGLIYGIQHNYDWLTIGRMGNLMGALKVEHPGTQNQRFDFAEFNDQFKQYFGYAL

SEQ ID NO: 1067 - DNA, 963 bp, synthetic construct
  misc_feature 1..963: note = Variant of adenosine kinase
  source 1..963: mol_type = other DNA
atgcaccatcatcaccatcacgggggctccggcatgagtgcactgatttgcggttctttagcgtatgataccatcatggtgtttccggaccagttcaagaaccatattctgcccgatcgtgttcaccgcctcaatgtcagctttcttgtaccacgcatgcgtcgtgaatttggaggctgtgccggcaacattgcgtacaatctgcatctgttgggtggtgctccgatcgtaatggctacggtgggccaagatttcggtccgtatcgcgagcacttcgaaactctgggcattgacttatcccgcgtcaagatcatcgatgatctgagtacaccgcaggccttcattaccaccgacatggatcataaccagattacggcgtttcatggcggcgcaatgatgcgttcgtacgaaaatcacgttcgtgatgtgccgggtgttaccttgggcctcgtaggtcctgatggacgcgagggcatgatccaaaatgccgaagaatttgctgctggtggcattccgttcatttttgacccaggtcaggcactgccgctgttcaacggccccgaactgcgcgagtttatcgaacaggcggactatgtggtggtcaacgattacgaaagcaatcttcttcaaacgcgtactggctggaacgagcaggacattgtttcacgcgtgcaggcgtatatcaccacgcaaggttcggctggagccctggtacatacaccggataagacctacgatattccgccggctcacacccgtcgtgtcgttgatccaactggttgcggcgacgcgtttcgcgccggcctgatctatggtattcagcataattatgattggttgaccattggccgcatgggaaacttaatgggtgcgctgaaagtggaacaccctggcacccaaaatcagcgtttcgattttgccgaattcaacgaccagttcaaacaatattttggctacgcgctc

SEQ ID NO: 1068 - protein, 321 aa, synthetic construct
  REGION 1..321: note = Variant of adenosine kinase
MHHHHHHGGSGMSALICGSLAYDTIMVFPDQFKNHILPDRVHRLNVSFLVPRMRREFGGCAGNIAYNLHLLGGAPIVMATVGQDFGPYREHFETLGIDLSRVKIIDDLSTPQAFITTDMDHNQITAFHGGAMMRSYENHVRDVPGVTLGLVGPDGREGMIQNAEEFAAGGIPFIFDPGQALPLFNGPELREFIEQADYVVVNDYESNLLQTRTGWNEQDIVSRVQAYITTQGSAGALVHTPDKTYDIPPAHTRRVVDPTGCGDAFRAGLIYGIQHNYDWLTIGRMGNLMGALKVEHPGTQNQRFDFAEFNDQFKQYFGYAL

SEQ ID NO: 1069 - DNA, 963 bp, synthetic construct
  misc_feature 1..963: note = Variant of adenosine kinase
  source 1..963: mol_type = other DNA
atgcaccatcatcaccatcacgggggctccggcatgagtgcactgatttgcggttctttagcgtatgataccatcatggtgtttccggaccagttcaagaaccatattctgcccgatcgtgttcaccgcctcaatgtcagctttcttgtaagtcgcatgcgtcgtgaatttggaggctgtgccggcaacattgcgtacaatctgcatctgttgggtggtgctccgatcgtaatggctacggtgggccaagatttcggtccgtatcgcgagcacttcgaaactctgggcattgacttatcccgcgtcaagatcatcgatgatctgagtacaccgcaggccttcattaccaccgacatggatcataaccagattacggcgtttcatggcggcgcaatgatgcgttcgtacgaaaatcacgttcgtgatgtgccgggtgttaccttgggcctcgtaggtcctgatggacgcgagggcatgatccaaaatgccgaagaatttgctgctggtggcattccgttcatttttgacccaggtcaggcactgccgctgttcaacggccccgaactgcgcgagtttatcgaacaggcggactatgtggtggtcaacgattacgaaagcaatcttcttcaaacgcgtactggctggaacgagcaggacattgtttcacgcgtgcaggcgtatatcaccacgcaaggttcggctggagccctggtacatacaccggagaagacctacgatattccgccggctcacacccgtcgtgtcgttgatccaactggttgcggcgacgcgtttcgcgccggcctgatctatggtattcagcataattatgattggttgaccattggccgcatgggaaacttaatgggtgcgctgaaagtggaacaccctggcacccaaaatcagcgtttcgattttgccgaattcaacgaccagttcaaacaatattttggctacgcgctc

SEQ ID NO: 1070 - protein, 321 aa, synthetic construct
  REGION 1..321: note = Variant of adenosine kinase
MHHHHHHGGSGMSALICGSLAYDTIMVFPDQFKNHILPDRVHRLNVSFLVSRMRREFGGCAGNIAYNLHLLGGAPIVMATVGQDFGPYREHFETLGIDLSRVKIIDDLSTPQAFITTDMDHNQITAFHGGAMMRSYENHVRDVPGVTLGLVGPDGREGMIQNAEEFAAGGIPFIFDPGQALPLFNGPELREFIEQADYVVVNDYESNLLQTRTGWNEQDIVSRVQAYITTQGSAGALVHTPEKTYDIPPAHTRRVVDPTGCGDAFRAGLIYGIQHNYDWLTIGRMGNLMGALKVEHPGTQNQRFDFAEFNDQFKQYFGYAL

SEQ ID NO: 1071 - DNA, 963 bp, synthetic construct
  misc_feature 1..963: note = Variant of adenosine kinase
  source 1..963: mol_type = other DNA
atgcaccatcatcaccatcacgggggctccggcatgagtgcactgatttgcggttctttagcgtatgataccatcatggtgtttccggaccagttcaagaaccatattctgcccgatcgtgttcaccgcctcaatgtcagctttcttgtaccacgcatgcgtcgtgaatttggaggctgtgccggcaacattgcgtacaatctgcatctgttgggtggtgctccgatcgtaatggctacggtgggccaagatttcggtccgtatcgcgagcacttcgaaactctgggcattgacttatcccgcgtccttatcatcgatgatctgagtacaccgcaggccttcattaccaccgacatggatcataaccagattacggcgtttcatggcggcgcaatgatgcgttcgtacgaaaatcacgttcgtgatgtgccgggtgttaccttgggcctcgtaggtcctgatggacgcgagggcatgatccaaaatgccgaagaatttgctgctggtggcattccgttcatttttgacccaggtcaggcactgccgctgttcaacggccccgaactgcgcgagtttatcgaacaggcggactatgtggtggtcaacgattacgaaagcaatcttcttcaaacgcgtactggctggaacgagcaggacattgtttcacgcgtgcaggcgtatatcaccacgcaaggttcggctggagccctggtacatacaccggagaagacctacgatattccgccggctcacacccgtcgtgtcgttgatccaactggttgcggcgacgcgtttcgcgccggcctgatctatggtattcagcataattatgattggttgaccattggccgcatgggaaacttaatgggtgcgctgaaagtggaacaccctggcacccaaaatcagcgtttcgattttgccgaattcaacgaccagttcaaacaatattttggctacgcgctc

SEQ ID NO: 1072 - protein, 321 aa, synthetic construct
  REGION 1..321: note = Variant of adenosine kinase
MHHHHHHGGSGMSALICGSLAYDTIMVFPDQFKNHILPDRVHRLNVSFLVPRMRREFGGCAGNIAYNLHLLGGAPIVMATVGQDFGPYREHFETLGIDLSRVLIIDDLSTPQAFITTDMDHNQITAFHGGAMMRSYENHVRDVPGVTLGLVGPDGREGMIQNAEEFAAGGIPFIFDPGQALPLFNGPELREFIEQADYVVVNDYESNLLQTRTGWNEQDIVSRVQAYITTQGSAGALVHTPEKTYDIPPAHTRRVVDPTGCGDAFRAGLIYGIQHNYDWLTIGRMGNLMGALKVEHPGTQNQRFDFAEFNDQFKQYFGYAL

SEQ ID NO: 1073 - DNA, 963 bp, synthetic construct
  misc_feature 1..963: note = Variant of adenosine kinase
  source 1..963: mol_type = other DNA
atgcaccatcatcaccatcacgggggctccggcatgagtgcactgatttgcggttctttagcgtatgataccatcatggtgtttccggaccagttcaagaaccatattctgcccgatcgtgttcaccgcctcaatgtcagctttcttgtaccacgcatgcgtcgtgaatttggaggctgtgccggcaacattgcgtacaatctgcatctgttgggtggtgctccgatcgtaatggctacggtgggccaagatttcggtccgtatcgcgagcacttcgaaactctgggcattgacttatcccgcgtcaagatcatcgatgatctgagtacaccgcaggccttcattaccaccgacatggatcataaccagattacggcgtttcatggcggcgcaatgatgcgttcgtacgaaaatcacgttcgtgatgtgccgggtgttaccttgggcctcgtaggtcctgatggacgcgagggcatgatccaaaatgccgaagaatttgctgctggtggcattccgttcatttttgacccaggtcaggcactgccgctgttcaacggccccgaactgcgcaggtttatcgaacaggcggactatgtggtggtcaacgattacgaaagcaatcttcttcaaacgcgtactggctggaacgagcaggacattgtttcacgcgtgcaggcgtatatcaccacgcaaggttcggctggagccctggtacatacaccggagaagacctacgatattccgccggctcacacccgtcgtgtcgttgatccaactggttgcggcgacgcgtttcgcgccggcctgatctatggtattcagcataattatgattggttgaccattggccgcatgggaaacttaatgggtgcgctgaaagtggaacaccctggcacccaaaatcagcgtttcgattttgccgaattcaacgaccagttcaaacaatattttggctacgcgctc

SEQ ID NO: 1074 - protein, 321 aa, synthetic construct
  REGION 1..321: note = Variant of adenosine kinase
MHHHHHHGGSGMSALICGSLAYDTIMVFPDQFKNHILPDRVHRLNVSFLVPRMRREFGGCAGNIAYNLHLLGGAPIVMATVGQDFGPYREHFETLGIDLSRVKIIDDLSTPQAFITTDMDHNQITAFHGGAMMRSYENHVRDVPGVTLGLVGPDGREGMIQNAEEFAAGGIPFIFDPGQALPLFNGPELRRFIEQADYVVVNDYESNLLQTRTGWNEQDIVSRVQAYITTQGSAGALVHTPEKTYDIPPAHTRRVVDPTGCGDAFRAGLIYGIQHNYDWLTIGRMGNLMGALKVEHPGTQNQRFDFAEFNDQFKQYFGYAL

SEQ ID NO: 1075 - DNA, 963 bp, synthetic construct
  misc_feature 1..963: note = Variant of adenosine kinase
  source 1..963: mol_type = other DNA
atgcaccatcatcaccatcacgggggctccggcatgagtgcactgatttgcggttctttagcgtatgataccatcatggtgtttccggaccagttcaagaaccatattctgcccgatcgtgttcaccgcctcaatgtcagctttcttgtaccacgcatgcgtcgtgaatttggaggctgtgccggcaacattgcgtacaatctgcatctgttgggtggtgctccgatcgtaatggctacggtgggccaagatttcggtccgtatcgcgagcacttcgaaactctgggcattgacttatcctttgtcaagatcatcgatgatctgagtacaccgcaggccttcattaccaccgacatggatcataaccagattacggcgtttcatggcggcgcaatgatgcgttcgtacgaaaatcacgttcgtgatgtgccgggtgttaccttgggcctcgtaggtcctgatggacgcgagggcatgatccaaaatgccgaagaatttgctgctggtggcattccgttcatttttgacccaggtcaggcactgccgctgttcaacggccccgaactgcgcgagtttatcgaacaggcggactatgtggtggtcaacgattacgaaagcaatcttcttcaaacgcgtactggctggaacgagcaggacattgtttcacgcgtgcaggcgtatatcaccacgcaaggttcggctggagccctggtacatacaccggagaagacctacgatattccgccggctcacacccgtcgtgtcgttgatccaactggttgcggcgacgcgtttcgcgccggcctgatctatggtattcagcataattatgattggttgaccattggccgcatgggaaacttaatgggtgcgctgaaagtggaacaccctggcacccaaaatcagcgtttcgattttgccgaattcaacgaccagttcaaacaatattttggctacgcgctc

SEQ ID NO: 1076 - protein, 321 aa, synthetic construct
  REGION 1..321: note = Variant of adenosine kinase
MHHHHHHGGSGMSALICGSLAYDTIMVFPDQFKNHILPDRVHRLNVSFLVPRMRREFGGCAGNIAYNLHLLGGAPIVMATVGQDFGPYREHFETLGIDLSFVKIIDDLSTPQAFITTDMDHNQITAFHGGAMMRSYENHVRDVPGVTLGLVGPDGREGMIQNAEEFAAGGIPFIFDPGQALPLFNGPELREFIEQADYVVVNDYESNLLQTRTGWNEQDIVSRVQAYITTQGSAGALVHTPEKTYDIPPAHTRRVVDPTGCGDAFRAGLIYGIQHNYDWLTIGRMGNLMGALKVEHPGTQNQRFDFAEFNDQFKQYFGYAL

SEQ ID NO: 1077 - DNA, 963 bp, synthetic construct
  misc_feature 1..963: note = Variant of adenosine kinase
  source 1..963: mol_type = other DNA
atgcaccatcatcaccatcacgggggctccggcatgagtgcactgatttgcggttctttagcgtatgataccatcatggtgtttccggaccagttcaagaaccatattctgcccgatcgtgttcaccgcctcaatgtcagctttcttgtaccacgcatgcgtcgtgaatttggaggctgtgccggcaacattgcgtacaatctgcatctgttgggtggtgctccgatcgtaatggctacggtgggcacggatttcggtccgtatcgcgagcacttcgaaactctgggcattgacttatcccgcgtcaagatcatcgatgatctgagtacaccgcaggccttcattaccaccgacatggatcataaccagattacggcgtttcatggcggcgcaatgatgcgttcgtacgaaaatcacgttcgtgatgtgccgggtgttaccttgggcctcgtaggtcctgatggacgcgagggcatgatccaaaatgccgaagaatttgctgctggtggcattccgttcatttttgacccaggtcaggcactgccgctgttcaacggccccgaactgcgcgagtttatcgaacaggcggactatgtggtggtcaacgattacgaaagcaatcttcttcaaacgcgtactggctggaacgagcaggacattgtttcacgcgtgcaggcgtatatcaccacgcaaggttcggctggagccctggtacatacaccggagaagacctacgatattccgccggctcacacccgtcgtgtcgttgatccaactggttgcggcgacgcgtttcgcgccggcctgatctatggtattcagcataattatgattggttgaccattggccgcatgggaaacttaatgggtgcgctgaaagtggaacaccctggcacccaaaatcagcgtttcgattttgccgaattcaacgaccagttcaaacaatattttggctacgcgctc

SEQ ID NO: 1078 - protein, 321 aa, synthetic construct
  REGION 1..321: note = Variant of adenosine kinase
MHHHHHHGGSGMSALICGSLAYDTIMVFPDQFKNHILPDRVHRLNVSFLVPRMRREFGGCAGNIAYNLHLLGGAPIVMATVGTDFGPYREHFETLGIDLSRVKIIDDLSTPQAFITTDMDHNQITAFHGGAMMRSYENHVRDVPGVTLGLVGPDGREGMIQNAEEFAAGGIPFIFDPGQALPLFNGPELREFIEQADYVVVNDYESNLLQTRTGWNEQDIVSRVQAYITTQGSAGALVHTPEKTYDIPPAHTRRVVDPTGCGDAFRAGLIYGIQHNYDWLTIGRMGNLMGALKVEHPGTQNQRFDFAEFNDQFKQYFGYAL

SEQ ID NO: 1079 - DNA, 963 bp, synthetic construct
  misc_feature 1..963: note = Variant of adenosine kinase
  source 1..963: mol_type = other DNA
atgcaccatcatcaccatcacgggggctccggcatgagtgcactgatttgcggttctttagcgtatgataccatcatggtgtttccggaccagttcaagaaccatattctgcccgatcgtgttcaccgcctcaatgtcagctttcttgtaccatttatgcgtcgtgaatttggaggctgtgccggcaacattgcgtacaatctgcatctgttgggtggtgctccgatcgtaatggctacggtgggccaagatttcggtccgtatcgcgagcacttcgaaactctgggcattgacttatcccgcgtcaagatcatcgatgatctgagtacaccgcaggccttcattaccaccgacatggatcataaccagattacggcgtttcatggcggcgcaatgatgcgttcgtacgaaaatcacgttcgtgatgtgccgggtgttaccttgggcctcgtaggtcctgatggacgcgagggcatgatccaaaatgccgaagaatttgctgctggtggcattccgttcatttttgacccaggtcaggcactgccgctgttcaacggccccgaactgcgcgagtttatcgaacaggcggactatgtggtggtcaacgattacgaaagcaatcttcttcaaacgcgtactggctggaacgagcaggacattgtttcacgcgtgcaggcgtatatcaccacgcaaggttcggctggagccctggtacatacaccggagaagacctacgatattccgccggctcacacccgtcgtgtcgttgatccaactggttgcggcgacgcgtttcgcgccggcctgatctatggtattcagcataattatgattggttgaccattggccgcatgggaaacttaatgggtgcgctgaaagtggaacaccctggcacccaaaatcagcgtttcgattttgccgaattcaacgaccagttcaaacaatattttggctacgcgctc

SEQ ID NO: 1080 - protein, 321 aa, synthetic construct
  REGION 1..321: note = Variant of adenosine kinase
MHHHHHHGGSGMSALICGSLAYDTIMVFPDQFKNHILPDRVHRLNVSFLVPFMRREFGGCAGNIAYNLHLLGGAPIVMATVGQDFGPYREHFETLGIDLSRVKIIDDLSTPQAFITTDMDHNQITAFHGGAMMRSYENHVRDVPGVTLGLVGPDGREGMIQNAEEFAAGGIPFIFDPGQALPLFNGPELREFIEQADYVVVNDYESNLLQTRTGWNEQDIVSRVQAYITTQGSAGALVHTPEKTYDIPPAHTRRVVDPTGCGDAFRAGLIYGIQHNYDWLTIGRMGNLMGALKVEHPGTQNQRFDFAEFNDQFKQYFGYAL

SEQ ID NO: 1081 - DNA, 963 bp, synthetic construct
  misc_feature 1..963: note = Variant of adenosine kinase
  source 1..963: mol_type = other DNA
atgcaccatcatcaccatcacgggggctccggcatgagtgcactgatttgcggttctttagcgtatgataccatcatggtgtttccggaccagttcaagaaccatattctgcccgatcgtgttcaccgcctcaatgtcagctttcttgtaccacgcatgcgtcgtgaatttggaggctgtgccggcaacattgcgtacaatctgcatctgttgggtggtgctccgatcgtaatggctacggtgggccaagatttcggtccgtatcgcgagcacttcgaaactctgggcattgacttatcccgcgtcaagatcatcgatgatctgagtacaccgcaggccttcattaccaccgacatggatcataaccagattacggcgtttcatggcggcgcaatgatgcgttcgtacgaaaatcacgttcgtgatgtgccgggtgttaccttgggcctcgtaggtcctgatggacgcgagggcatgatccaaaatgccggtgaatttgctgctggtggcattccgttcatttttgacccaggtcaggcactgccgctgttcaacggccccgaactgcgcgagtttatcgaacaggcggactatgtggtggtcaacgattacgaaagcaatcttcttcaaacgcgtactggctggaacgagcaggacattgtttcacgcgtgcaggcgtatatcaccacgcaaggttcggctggagccctggtacatacaccggagaagacctacgatattccgccggctcacacccgtcgtgtcgttgatccaactggttgcggcgacgcgtttcgcgccggcctgatctatggtattcagcataattatgattggttgaccattggccgcatgggaaacttaatgggtgcgctgaaagtggaacaccctggcacccaaaatcagcgtttcgattttgccgaattcaacgaccagttcaaacaatattttggctacgcgctc

SEQ ID NO: 1082 - protein, 321 aa, synthetic construct
  REGION 1..321: note = Variant of adenosine kinase
MHHHHHHGGSGMSALICGSLAYDTIMVFPDQFKNHILPDRVHRLNVSFLVPRMRREFGGCAGNIAYNLHLLGGAPIVMATVGQDFGPYREHFETLGIDLSRVKIIDDLSTPQAFITTDMDHNQITAFHGGAMMRSYENHVRDVPGVTLGLVGPDGREGMIQNAGEFAAGGIPFIFDPGQALPLFNGPELREFIEQADYVVVNDYESNLLQTRTGWNEQDIVSRVQAYITTQGSAGALVHTPEKTYDIPPAHTRRVVDPTGCGDAFRAGLIYGIQHNYDWLTIGRMGNLMGALKVEHPGTQNQRFDFAEFNDQFKQYFGYAL

SEQ ID NO: 1083 - DNA, 963 bp, synthetic construct
  misc_feature 1..963: note = Variant of adenosine kinase
  source 1..963: mol_type = other DNA
atgcaccatcatcaccatcacgggggctccggcatgagtgcactgatttgcggttctttagcgtatgataccatcatggtgtttccggaccagttcaagaaccatattctgcccgatcgtgttcaccgcctcaatgtcagctttcttgtaccacgcatgcgtcgtgaatttggaggctgtgccggcaacattgcgtacaatctgcatctgttgggtggtgctccgatcgtaatggctacggtgggccaagatttcggtccgtatcgcgagcacttcgaaactctgggcattgacttatcccgcgtcaagatcatcgatgatctgagtacaccgcaggccttcattaccaccgacatggatcataaccagattacggcgtttcatggcggcgcaatgatgcgttcgtacgaaaatcacgttcgtgatgtgccgggtgttaccttgggcctcgtaggtcctgatggacgcgagggcatgatccaaaatgccgaagaatttgctgctggtggcattccgttcatttttgacccaggtcaggcactgccgctgttcaacggccccgaactgcgcgagtttatcgaaatggcggactatgtggtggtcaacgattacgaaagcaatcttcttcaaacgcgtactggctggaacgagcaggacattgtttcacgcgtgcaggcgtatatcaccacgcaaggttcggctggagccctggtacatacaccggagaagacctacgatattccgccggctcacacccgtcgtgtcgttgatccaactggttgcggcgacgcgtttcgcgccggcctgatctatggtattcagcataattatgattggttgaccattggccgcatgggaaacttaatgggtgcgctgaaagtggaacaccctggcacccaaaatcagcgtttcgattttgccgaattcaacgaccagttcaaacaatattttggctacgcgctc

SEQ ID NO: 1084 - protein, 321 aa, synthetic construct
  REGION 1..321: note = Variant of adenosine kinase
MHHHHHHGGSGMSALICGSLAYDTIMVFPDQFKNHILPDRVHRLNVSFLVPRMRREFGGCAGNIAYNLHLLGGAPIVMATVGQDFGPYREHFETLGIDLSRVKIIDDLSTPQAFITTDMDHNQITAFHGGAMMRSYENHVRDVPGVTLGLVGPDGREGMIQNAEEFAAGGIPFIFDPGQALPLFNGPELREFIEMADYVVVNDYESNLLQTRTGWNEQDIVSRVQAYITTQGSAGALVHTPEKTYDIPPAHTRRVVDPTGCGDAFRAGLIYGIQHNYDWLTIGRMGNLMGALKVEHPGTQNQRFDFAEFNDQFKQYFGYAL

SEQ ID NO: 1085 - DNA, 963 bp, synthetic construct
  misc_feature 1..963: note = Variant of adenosine kinase
  source 1..963: mol_type = other DNA
atgcaccatcatcaccatcacgggggctccggcatgagtgcactgatttgcggttctttagcgtatgataccatcatggtgtttccggaccagttcaagaaccatattctgcccgatcgtgttcacaagctcaatgtcagctttcttgtaccacgcatgcgtcgtgaatttggaggctgtgccggcaacattgcgtacaatctgcatctgttgggtggtgctccgatcgtaatggctacggtgggccaagatttcggtccgtatcgcgagcacttcgaaactctgggcattgacttatcccgcgtcaagatcatcgatgatctgagtacaccgcaggccttcattaccaccgacatggatcataaccagattacggcgtttcatggcggcgcaatgatgcgttcgtacgaaaatcacgttcgtgatgtgccgggtgttaccttgggcctcgtaggtcctgatggacgcgagggcatgatccaaaatgccgaagaatttgctgctggtggcattccgttcatttttgacccaggtcaggcactgccgctgttcaacggccccgaactgcgcgagtttatcgaacaggcggactatgtggtggtcaacgattacgaaagcaatcttcttcaaacgcgtactggctggaacgagcaggacattgtttcacgcgtgcaggcgtatatcaccacgcaaggttcggctggagccctggtacatacaccggagaagacctacgatattccgccggctcacacccgtcgtgtcgttgatccaactggttgcggcgacgcgtttcgcgccggcctgatctatggtattcagcataattatgattggttgaccattggccgcatgggaaacttaatgggtgcgctgaaagtggaacaccctggcacccaaaatcagcgtttcgattttgccgaattcaacgaccagttcaaacaatattttggctacgcgctc

SEQ ID NO: 1086 - protein, 321 aa, synthetic construct
  REGION 1..321: note = Variant of adenosine kinase
MHHHHHHGGSGMSALICGSLAYDTIMVFPDQFKNHILPDRVHKLNVSFLVPRMRREFGGCAGNIAYNLHLLGGAPIVMATVGQDFGPYREHFETLGIDLSRVKIIDDLSTPQAFITTDMDHNQITAFHGGAMMRSYENHVRDVPGVTLGLVGPDGREGMIQNAEEFAAGGIPFIFDPGQALPLFNGPELREFIEQADYVVVNDYESNLLQTRTGWNEQDIVSRVQAYITTQGSAGALVHTPEKTYDIPPAHTRRVVDPTGCGDAFRAGLIYGIQHNYDWLTIGRMGNLMGALKVEHPGTQNQRFDFAEFNDQFKQYFGYAL

SEQ ID NO: 1087 - DNA, 963 bp, synthetic construct
  misc_feature 1..963: note = Variant of adenosine kinase
  source 1..963: mol_type = other DNA
atgcaccatcatcaccatcacgggggctccggcatgagtgcactgatttgcggttctttagcgtatgataccatcatggtgtttccggaccagttcaagaaccatattctgcccgatcgtgttcaccgcctcaatgtcagctttcttgtaccacgcatgcgtcgtgaatttggaggctgtgccggcaacattgcgtacaatctgcatctgttgggtggtgctccgatcgtaatggctacggtgggccaagatttcggtccgtatcgcgagcacttcgaaactctgggcattgacttatcccgcgtcaagatcatcgatgatctgagtacaccgcaggccttcattaccaccgacatggatcataaccagattacggcgtttcatggcggcgcaatgatgcgttcgtacgaaaatcacgttcgtgatgtgccgggtgtttctttgggcctcgtaggtcctgatggacgcgagggcatgatccaaaatgccgaagaatttgctgctggtggcattccgttcatttttgacccaggtcaggcactgccgctgttcaacggccccgaactgcgcgagtttatcgaacaggcggactatgtggtggtcaacgattacgaaagcaatcttcttcaaacgcgtactggctggaacgagcaggacattgtttcacgcgtgcaggcgtatatcaccacgcaaggttcggctggagccctggtacatacaccggagaagacctacgatattccgccggctcacacccgtcgtgtcgttgatccaactggttgcggcgacgcgtttcgcgccggcctgatctatggtattcagcataattatgattggttgaccattggccgcatgggaaacttaatgggtgcgctgaaagtggaacaccctggcacccaaaatcagcgtttcgattttgccgaattcaacgaccagttcaaacaatattttggctacgcgctc

SEQ ID NO: 1088 - protein, 321 aa, synthetic construct
  REGION 1..321: note = Variant of adenosine kinase
MHHHHHHGGSGMSALICGSLAYDTIMVFPDQFKNHILPDRVHRLNVSFLVPRMRREFGGCAGNIAYNLHLLGGAPIVMATVGQDFGPYREHFETLGIDLSRVKIIDDLSTPQAFITTDMDHNQITAFHGGAMMRSYENHVRDVPGVSLGLVGPDGREGMIQNAEEFAAGGIPFIFDPGQALPLFNGPELREFIEQADYVVVNDYESNLLQTRTGWNEQDIVSRVQAYITTQGSAGALVHTPEKTYDIPPAHTRRVVDPTGCGDAFRAGLIYGIQHNYDWLTIGRMGNLMGALKVEHPGTQNQRFDFAEFNDQFKQYFGYAL

SEQ ID NO: 1089 - DNA, 963 bp, synthetic construct
  misc_feature 1..963: note = Variant of adenosine kinase
  source 1..963: mol_type = other DNA
atgcaccatcatcaccatcacgggggctccggcatgagtgcactgatttgcggttctttagcgtatgataccatcatggtgtttccggaccagttcaagaaccatattctgcccgatcgtgttcaccgcctcaatgtcagctttcttgtaccacgcatgcgtcgtgaatttggaggctgtgccggcaacattgcgtacaatctgcatctgttgggtggtgctccgatcgtaatggctacggtgggccaagatttcggtccgtatcgcgagcacttcgaaactctgggcattgacttatcccgcgtcaagatcatcgatgatctgagtacaccgcaggccttcattaccaccgacatggatcataaccagattacggcgtttcatggcggcgcaatgatgcgttcgtacgaaaatcacgttcgtgatgtgccgggtgttaccttgggcctcgtaggtcctgatggacgcgagggcatgatccaaaatgccgaagaatttgctgctggtggcattccgttcatttttgacccaggtcaggcactgccgctgttcaacggccaggaactgcgcgagtttatcgaacaggcggactatgtggtggtcaacgattacgaaagcaatcttcttcaaacgcgtactggctggaacgagcaggacattgtttcacgcgtgcaggcgtatatcaccacgcaaggttcggctggagccctggtacatacaccggagaagacctacgatattccgccggctcacacccgtcgtgtcgttgatccaactggttgcggcgacgcgtttcgcgccggcctgatctatggtattcagcataattatgattggttgaccattggccgcatgggaaacttaatgggtgcgctgaaagtggaacaccctggcacccaaaatcagcgtttcgattttgccgaattcaacgaccagttcaaacaatattttggctacgcgctc

SEQ ID NO: 1090 - protein, 321 aa, synthetic construct
  REGION 1..321: note = Variant of adenosine kinase
MHHHHHHGGSGMSALICGSLAYDTIMVFPDQFKNHILPDRVHRLNVSFLVPRMRREFGGCAGNIAYNLHLLGGAPIVMATVGQDFGPYREHFETLGIDLSRVKIIDDLSTPQAFITTDMDHNQITAFHGGAMMRSYENHVRDVPGVTLGLVGPDGREGMIQNAEEFAAGGIPFIFDPGQALPLFNGQELREFIEQADYVVVNDYESNLLQTRTGWNEQDIVSRVQAYITTQGSAGALVHTPEKTYDIPPAHTRRVVDPTGCGDAFRAGLIYGIQHNYDWLTIGRMGNLMGALKVEHPGTQNQRFDFAEFNDQFKQYFGYAL

SEQ ID NO: 1091 - DNA, 963 bp, synthetic construct
  misc_feature 1..963: note = Variant of adenosine kinase
  source 1..963: mol_type = other DNA
atgcaccatcatcaccatcacgggggctccggcatgagtgcactgatttgcggttctttagcgtatgataccatcatggtgtttccggaccagttcaagaaccatattctgcccgatcgtgttcaccgcctcaatgtcagctttcttgtaccacgcatgcgtcgtgaatttggaggctgtgccggcaacattgcgtacaatctgcatctgttgggtggtgctccgatcgtaatggctacggtgggccaagatttcggtccgtatcgcgagcacttcgaaactctgggcattgacttatcccgcgtcaagatcatcgatgatctgagtacaccgcaggccttcattaccaccgacatggatcataaccagattacggcgtttcatggcggcgcaatgatgcgttcgtacgaaaatcacgttcgtgatgtgccgggtgttaccttgggcctcgtaggtcctgatggacgcgagggcatgatccaaaatgccgaagaatttgctgctggtggcattccgttcatttttgacccaggtcaggcactgccgctgttcaacggccccgaactgcgcgagtttatcgaacaggcggactatgtggtggtcaacgattacgaaagcaatcttcttcaaacgcgtactggctggaacgagcaggacattgtttcacgcgtgcaggcgtatatcaccacgcaaggttcggctggagccctggtacatacaccggagaagacctacgatattccgccggctcacacccgtcgtgtcgttgatccaactggttgcggcgacgcgtttcgcgccggcctgatctatggtattcagcataattatgattggttgaccattggccgcatgggaaacttaatgggtgcgctgaaagtggaacaccctggcacccaaaatcagcgtttcgattttgccgaattcaacatgcagttcaaacaatattttggctacgcgctc

SEQ ID NO: 1092 - protein, 321 aa, synthetic construct
  REGION 1..321: note = Variant of adenosine kinase
MHHHHHHGGSGMSALICGSLAYDTIMVFPDQFKNHILPDRVHRLNVSFLVPRMRREFGGCAGNIAYNLHLLGGAPIVMATVGQDFGPYREHFETLGIDLSRVKIIDDLSTPQAFITTDMDHNQITAFHGGAMMRSYENHVRDVPGVTLGLVGPDGREGMIQNAEEFAAGGIPFIFDPGQALPLFNGPELREFIEQADYVVVNDYESNLLQTRTGWNEQDIVSRVQAYITTQGSAGALVHTPEKTYDIPPAHTRRVVDPTGCGDAFRAGLIYGIQHNYDWLTIGRMGNLMGALKVEHPGTQNQRFDFAEFNMQFKQYFGYAL

SEQ ID NO: 1093 - DNA, 963 bp, synthetic construct
  misc_feature 1..963: note = Variant of adenosine kinase
  source 1..963: mol_type = other DNA
atgcaccatcatcaccatcacgggggctccggcatgagtgcactgatttgcggttctttagcgtatgataccatcatggtgtttccggaccagttcaagaaccatattctgcccgattgggttcaccgcctcaatgtcagctttcttgtaccacgcatgcgtcgtgaatttggaggctgtgccggcaacattgcgtacaatctgcatctgttgggtggtgctccgatcgtaatggctacggtgggccaagatttcggtccgtatcgcgagcacttcgaaactctgggcattgacttatcccgcgtcaagatcatcgatgatctgagtacaccgcaggccttcattaccaccgacatggatcataaccagattacggcgtttcatggcggcgcaatgatgcgttcgtacgaaaatcacgttcgtgatgtgccgggtgttaccttgggcctcgtaggtcctgatggacgcgagggcatgatccaaaatgccgaagaatttgctgctggtggcattccgttcatttttgacccaggtcaggcactgccgctgttcaacggccccgaactgcgcgagtttatcgaacaggcggactatgtggtggtcaacgattacgaaagcaatcttcttcaaacgcgtactggctggaacgagcaggacattgtttcacgcgtgcaggcgtatatcaccacgcaaggttcggctggagccctggtacatacaccggagaagacctacgatattccgccggctcacacccgtcgtgtcgttgatccaactggttgcggcgacgcgtttcgcgccggcctgatctatggtattcagcataattatgattggttgaccattggccgcatgggaaacttaatgggtgcgctgaaagtggaacaccctggcacccaaaatcagcgtttcgattttgccgaattcaacgaccagttcaaacaatattttggctacgcgctc

SEQ ID NO: 1094 - protein, 321 aa, synthetic construct
  REGION 1..321: note = Variant of adenosine kinase
MHHHHHHGGSGMSALICGSLAYDTIMVFPDQFKNHILPDWVHRLNVSFLVPRMRREFGGCAGNIAYNLHLLGGAPIVMATVGQDFGPYREHFETLGIDLSRVKIIDDLSTPQAFITTDMDHNQITAFHGGAMMRSYENHVRDVPGVTLGLVGPDGREGMIQNAEEFAAGGIPFIFDPGQALPLFNGPELREFIEQADYVVVNDYESNLLQTRTGWNEQDIVSRVQAYITTQGSAGALVHTPEKTYDIPPAHTRRVVDPTGCGDAFRAGLIYGIQHNYDWLTIGRMGNLMGALKVEHPGTQNQRFDFAEFNDQFKQYFGYAL

SEQ ID NO: 1095 - DNA, 963 bp, synthetic construct
  misc_feature 1..963: note = Variant of adenosine kinase
  source 1..963: mol_type = other DNA
atgcaccatcatcaccatcacgggggctccggcatgagtgcactgatttgcggttctttagcgtatgataccatcatggtgtttccggaccagttcaagaaccatattctgcccgatcgtgttcaccgcctcaatgtcagctttcttgtaccacgcatgcgtcgtgaatttggaggctgtgccggcaacattgcgtacaatctgcatctgttgggtggtgctccgatcgtaatggctacggtgggccaagatttcggtccgtatcgcgagcacttcgaaactctgggcattgacttatcccgcgtcaagatcatcgatgatctgagtacaccgcaggccttcattaccaccgacatggatcataaccagattacggcgtttcatggcggcgcaatgatgcgttcgtacgaaaatcacgttcgtgatgtgccgggtgttaccttgggcctcgtaggtcctgatggacgcgagggcatgatccaaaatgccgaagaatttgctgctattggcattccgttcatttttgacccaggtcaggcactgccgctgttcaacggccccgaactgcgcgagtttatcgaacaggcggactatgtggtggtcaacgattacgaaagcaatcttcttcaaacgcgtactggctggaacgagcaggacattgtttcacgcgtgcaggcgtatatcaccacgcaaggttcggctggagccctggtacatacaccggagaagacctacgatattccgccggctcacacccgtcgtgtcgttgatccaactggttgcggcgacgcgtttcgcgccggcctgatctatggtattcagcataattatgattggttgaccattggccgcatgggaaacttaatgggtgcgctgaaagtggaacaccctggcacccaaaatcagcgtttcgattttgccgaattcaacgaccagttcaaacaatattttggctacgcgctc

SEQ ID NO: 1096 - protein, 321 aa, synthetic construct
  REGION 1..321: note = Variant of adenosine kinase
MHHHHHHGGSGMSALICGSLAYDTIMVFPDQFKNHILPDRVHRLNVSFLVPRMRREFGGCAGNIAYNLHLLGGAPIVMATVGQDFGPYREHFETLGIDLSRVKIIDDLSTPQAFITTDMDHNQITAFHGGAMMRSYENHVRDVPGVTLGLVGPDGREGMIQNAEEFAAIGIPFIFDPGQALPLFNGPELREFIEQADYVVVNDYESNLLQTRTGWNEQDIVSRVQAYITTQGSAGALVHTPEKTYDIPPAHTRRVVDPTGCGDAFRAGLIYGIQHNYDWLTIGRMGNLMGALKVEHPGTQNQRFDFAEFNDQFKQYFGYAL

SEQ ID NO: 1097 - DNA, 963 bp, synthetic construct
  misc_feature 1..963: note = Variant of adenosine kinase
  source 1..963: mol_type = other DNA
atgcaccatcatcaccatcacgggggctccggcatgagtgcactgatttgcggttctttagcgtatgataccatcatggtgtttccggaccagttcaagaaccatattctgcccgatcgtgttcaccgcctcaatgtcagctttcttgtaccacgcatgcgtcgtgaatttggaggctgtgccggcaacattgcgtacaatctgcatctgttgggtggtgctccgatcgtaatggctacggtgggccaagatttcggtccgtatcgcgagcacttcgaaactctgggcattgacttatcccgcgtcaagatcatcgatgatctgagtacaccgcaggccttcattaccaccgacatggatcataaccagattacggcgtttcatggcggcgcaatgatgcgttcgtacgaaaatcacgttcgtgatgtgccgggtgttaccttgggcctcgtaggtcctgatggacgcgagggcatgatccaaaatgccgaagaatttgctgctggtggcattccgttcatttttgacccaggtcaggcactgccgctgttcaacggccccgaactgcgcgagtttatcgaacaggcggactatgtggtggtcaacgattacgaaagcaatcttcttcaaacgcgtactggctggaacgagcaggacattgtttcacgcgtgcaggcgtatatcaccacgcaaggttcggctggagccctggtacatacaccgactaagacctacgatattccgccggctcacacccgtcgtgtcgttgatccaactggttgcggcgacgcgtttcgcgccggcctgatctatggtattcagcataattatgattggttgaccattggccgcatgggaaacttaatgggtgcgctgaaagtggaacaccctggcacccaaaatcagcgtttcgattttgccgaattcaacgaccagttcaaacaatattttggctacgcgctc

SEQ ID NO: 1098 - protein, 321 aa, synthetic construct
  REGION 1..321: note = Variant of adenosine kinase
MHHHHHHGGSGMSALICGSLAYDTIMVFPDQFKNHILPDRVHRLNVSFLVPRMRREFGGCAGNIAYNLHLLGGAPIVMATVGQDFGPYREHFETLGIDLSRVKIIDDLSTPQAFITTDMDHNQITAFHGGAMMRSYENHVRDVPGVTLGLVGPDGREGMIQNAEEFAAGGIPFIFDPGQALPLFNGPELREFIEQADYVVVNDYESNLLQTRTGWNEQDIVSRVQAYITTQGSAGALVHTPTKTYDIPPAHTRRVVDPTGCGDAFRAGLIYGIQHNYDWLTIGRMGNLMGALKVEHPGTQNQRFDFAEFNDQFKQYFGYAL

SEQ ID NO: 1099 - DNA, 963 bp, synthetic construct
  misc_feature 1..963: note = Variant of adenosine kinase
  source 1..963: mol_type = other DNA
atgcaccatcatcaccatcacgggggctccggcatgagtgcactgatttgcggttctttagcgtatgataccatcatggtgtttccggaccagttcaagaaccatattctgcccgatcgtgttcaccgcctcaatgtcagctttcttgtaccacgcatgcgtcgtgaatttggaggctgtgccggcaacattgcgtacaatctgcatctgttgggtggtgctccgatcgtaatggctacggtgggccaagatttcggtccgtatcgcgagcacttcgaaactctgggcattgacttatcctgggtcaagatcatcgatgatctgagtacaccgcaggccttcattaccaccgacatggatcataaccagattacggcgtttcatggcggcgcaatgatgcgttcgtacgaaaatcacgttcgtgatgtgccgggtgttaccttgggcctcgtaggtcctgatggacgcgagggcatgatccaaaatgccgaagaatttgctgctggtggcattccgttcatttttgacccaggtcaggcactgccgctgttcaacggccccgaactgcgcgagtttatcgaacaggcggactatgtggtggtcaacgattacgaaagcaatcttcttcaaacgcgtactggctggaacgagcaggacattgtttcacgcgtgcaggcgtatatcaccacgcaaggttcggctggagccctggtacatacaccggagaagacctacgatattccgccggctcacacccgtcgtgtcgttgatccaactggttgcggcgacgcgtttcgcgccggcctgatctatggtattcagcataattatgattggttgaccattggccgcatgggaaacttaatgggtgcgctgaaagtggaacaccctggcacccaaaatcagcgtttcgattttgccgaattcaacgaccagttcaaacaatattttggctacgcgctc

SEQ ID NO: 1100 - protein, 321 aa, synthetic construct
  REGION 1..321: note = Variant of adenosine kinase
MHHHHHHGGSGMSALICGSLAYDTIMVFPDQFKNHILPDRVHRLNVSFLVPRMRREFGGCAGNIAYNLHLLGGAPIVMATVGQDFGPYREHFETLGIDLSWVKIIDDLSTPQAFITTDMDHNQITAFHGGAMMRSYENHVRDVPGVTLGLVGPDGREGMIQNAEEFAAGGIPFIFDPGQALPLFNGPELREFIEQADYVVVNDYESNLLQTRTGWNEQDIVSRVQAYITTQGSAGALVHTPEKTYDIPPAHTRRVVDPTGCGDAFRAGLIYGIQHNYDWLTIGRMGNLMGALKVEHPGTQNQRFDFAEFNDQFKQYFGYAL

SEQ ID NO: 1101 - DNA, 963 bp, synthetic construct
  misc_feature 1..963: note = Variant of adenosine kinase
  source 1..963: mol_type = other DNA
atgcaccatcatcaccatcacgggggctccggcatgagtgcactgatttgcggttctttagcgtatgataccatcatggtgtttccggaccagttcaagaaccatattctgcccgatcgtgttcaccgcctcaatgtcagctttcttgtaccacgcatgcgtcgtgaatttggaggctgtgccggcaacattgcgtacaatctgcatctgttgggtggtgctccgatcgtaatggctacggtgggcttggatttcggtccgtatcgcgagcacttcgaaactctgggcattgacttatcccgcgtcaagatcatcgatgatctgagtacaccgcaggccttcattaccaccgacatggatcataaccagattacggcgtttcatggcggcgcaatgatgcgttcgtacgaaaatcacgttcgtgatgtgccgggtgttaccttgggcctcgtaggtcctgatggacgcgagggcatgatccaaaatgccgaagaatttgctgctggtggcattccgttcatttttgacccaggtcaggcactgccgctgttcaacggccccgaactgcgcgagtttatcgaacaggcggactatgtggtggtcaacgattacgaaagcaatcttcttcaaacgcgtactggctggaacgagcaggacattgtttcacgcgtgcaggcgtatatcaccacgcaaggttcggctggagccctggtacatacaccggagaagacctacgatattccgccggctcacacccgtcgtgtcgttgatccaactggttgcggcgacgcgtttcgcgccggcctgatctatggtattcagcataattatgattggttgaccattggccgcatgggaaacttaatgggtgcgctgaaagtggaacaccctggcacccaaaatcagcgtttcgattttgccgaattcaacgaccagttcaaacaatattttggctacgcgctc

SEQ ID NO: 1102 - protein, 321 aa, synthetic construct
  REGION 1..321: note = Variant of adenosine kinase
MHHHHHHGGSGMSALICGSLAYDTIMVFPDQFKNHILPDRVHRLNVSFLVPRMRREFGGCAGNIAYNLHLLGGAPIVMATVGLDFGPYREHFETLGIDLSRVKIIDDLSTPQAFITTDMDHNQITAFHGGAMMRSYENHVRDVPGVTLGLVGPDGREGMIQNAEEFAAGGIPFIFDPGQALPLFNGPELREFIEQADYVVVNDYESNLLQTRTGWNEQDIVSRVQAYITTQGSAGALVHTPEKTYDIPPAHTRRVVDPTGCGDAFRAGLIYGIQHNYDWLTIGRMGNLMGALKVEHPGTQNQRFDFAEFNDQFKQYFGYAL

SEQ ID NO: 1103 - DNA, 963 bp, synthetic construct
  misc_feature 1..963: note = Variant of adenosine kinase
  source 1..963: mol_type = other DNA
atgcaccatcatcaccatcacgggggctccggcatgagtgcactgatttgcggttctttagcgtatgataccatcatggtgtttccggaccagttcaagaaccatattctgcccgatcgtgttcaccgcctcaatgtcagctttcttgtaccacgcatgcgtcgtgaatttggaggctgtgccggcaacattgcgtacaatctgcatctgttgggtggtgctccgatcgtaatggctacggtgggccaagatttcggtccgtatcgcgagcacttcgaaactctgggcattgacttatcccgcgtcaagatcatcgatgatctgagtacaccgcaggccttcattaccaccgacatggatcataaccagattacggcgtttcatggcggcgcaatgatgcgttcgtacgaaaatcacgttcgtgatgtgccgggtgttaccttgggcctcgtaggtcctgatggacgcgagggcatgatccaaaatgccgaagaatttgctgctggtggcattccgttcatttttgacccaggtcaggcactgccgctgttcaacggccccgaactgcgcgagtttatcgaacaggcggactatgtggtggtcaacgattacgaaagcaatcttcttcaaacgcgtactggctggaacgagcaggacattgttatgcgcgtgcaggcgtatatcaccacgcaaggttcggctggagccctggtacatacaccggagaagacctacgatattccgccggctcacacccgtcgtgtcgttgatccaactggttgcggcgacgcgtttcgcgccggcctgatctatggtattcagcataattatgattggttgaccattggccgcatgggaaacttaatgggtgcgctgaaagtggaacaccctggcacccaaaatcagcgtttcgattttgccgaattcaacgaccagttcaaacaatattttggctacgcgctc

SEQ ID NO: 1104 - protein, 321 aa, synthetic construct
  REGION 1..321: note = Variant of adenosine kinase
MHHHHHHGGSGMSALICGSLAYDTIMVFPDQFKNHILPDRVHRLNVSFLVPRMRREFGGCAGNIAYNLHLLGGAPIVMATVGQDFGPYREHFETLGIDLSRVKIIDDLSTPQAFITTDMDHNQITAFHGGAMMRSYENHVRDVPGVTLGLVGPDGREGMIQNAEEFAAGGIPFIFDPGQALPLFNGPELREFIEQADYVVVNDYESNLLQTRTGWNEQDIVMRVQAYITTQGSAGALVHTPEKTYDIPPAHTRRVVDPTGCGDAFRAGLIYGIQHNYDWLTIGRMGNLMGALKVEHPGTQNQRFDFAEFNDQFKQYFGYAL

SEQ ID NO: 1105 - DNA, 963 bp, synthetic construct
  misc_feature 1..963: note = Variant of adenosine kinase
  source 1..963: mol_type = other DNA
atgcaccatcatcaccatcacgggggctccggcatgagtgcactgatttgcggttctttagcgtatgataccatcatggtgtttccggaccagttcaagaaccatattctgcccgatcgtgttcaccgcctcaatgtcagctttcttgtaccacgcatgcgtcgtgaatttggaggctgtgccggcaacattgcgtacaatctgcatctgttgggtggtgctccgatcgtaatggctacggtgggccaagatttcggtccgtatcgcgagcacttcgaaactctgggcattgacttatcccgcgtcaagatcatcgatgatctgagtacaccgcaggccttcattaccaccgacatggatcataaccagattacggcgtttcatggcggcgcaatgatgcgttcgtacgaaaatcacgttcgtgatgtgccgggtgttaccttgggcctcgtaggtcctgatggacgcgagggcatgatccaaaatgccgaagaatttgctgctggtagtattccgttcatttttgacccaggtcaggcactgccgctgttcaacggccccgaactgcgcgagtttatcgaacaggcggactatgtggtggtcaacgattacgaaagcaatcttcttcaaacgcgtactggctggaacgagcaggacattgtttcacgcgtgcaggcgtatatcaccacgcaaggttcggctggagccctggtacatacaccggagaagacctacgatattccgccggctcacacccgtcgtgtcgttgatccaactggttgcggcgacgcgtttcgcgccggcctgatctatggtattcagcataattatgattggttgaccattggccgcatgggaaacttaatgggtgcgctgaaagtggaacaccctggcacccaaaatcagcgtttcgattttgccgaattcaacgaccagttcaaacaatattttggctacgcgctc

SEQ ID NO: 1106 - protein, 321 aa, synthetic construct
  REGION 1..321: note = Variant of adenosine kinase
MHHHHHHGGSGMSALICGSLAYDTIMVFPDQFKNHILPDRVHRLNVSFLVPRMRREFGGCAGNIAYNLHLLGGAPIVMATVGQDFGPYREHFETLGIDLSRVKIIDDLSTPQAFITTDMDHNQITAFHGGAMMRSYENHVRDVPGVTLGLVGPDGREGMIQNAEEFAAGSIPFIFDPGQALPLFNGPELREFIEQADYVVVNDYESNLLQTRTGWNEQDIVSRVQAYITTQGSAGALVHTPEKTYDIPPAHTRRVVDPTGCGDAFRAGLIYGIQHNYDWLTIGRMGNLMGALKVEHPGTQNQRFDFAEFNDQFKQYFGYAL

SEQ ID NO: 1107 - DNA, 963 bp, synthetic construct
  misc_feature 1..963: note = Variant of adenosine kinase
  source 1..963: mol_type = other DNA
atgcaccatcatcaccatcacgggggctccggcatgagtgcactgatttgcggttctttagcgtatgataccatcatggtgtttccggaccagttcaagaaccatattctgcccgatcgtgttcaccgcctcaatgtcagctttcttgtaccacgcatgcgtcgtgaatttggaggctgtgccggcaacattgcgtacaatctgcatctgttgggtggtgctccgatcgtaatggctacggtgggccaagatttcggtccgtatcgcgagcacttcgaaactctgggcattgacttatcccgcgtcaagatcatcgatgatctgagtacaccgcaggccttcattaccaccgacatggatcataaccagattacggcgtttcatggcggcgcaatgatgcgttcgtacgaaaatcacgttcgtgatgtgccgggtgttaccttgggcctcgtaggtcctgatggacgcgagggcatgatccaaaatgccgaagaatttgctgctggtggcattccgttcatttttgacccaggtcaggcactgccgctgttcaacggccccgaactgcgcgagtttatcgaacaggcggactatgtggtggtcaacgattacgaaagcaatcttcttcaaacgcgtactggctggaacgagcaggacattgtttcacgcgtgcaggcgtatatcaccacgcaaggttcggctggagccctggtacatacaccggagaagacctacgatattccgccggctcacacccgtcgtgtcgttgatccaactggttgcggcgacgcgtttcgcgccggcctgatctatggtattcagcataattatgattggttgaccattggccgcatgggaaacttaatgggtgcgctgaaagtggaacaccctggcacccaaaatcagcgtttcgattttgccgaattcaactttcagttcaaacaatattttggctacgcgctc

SEQ ID NO: 1108 - protein, 321 aa, synthetic construct
  REGION 1..321: note = Variant of adenosine kinase
MHHHHHHGGSGMSALICGSLAYDTIMVFPDQFKNHILPDRVHRLNVSFLVPRMRREFGGCAGNIAYNLHLLGGAPIVMATVGQDFGPYREHFETLGIDLSRVKIIDDLSTPQAFITTDMDHNQITAFHGGAMMRSYENHVRDVPGVTLGLVGPDGREGMIQNAEEFAAGGIPFIFDPGQALPLFNGPELREFIEQADYVVVNDYESNLLQTRTGWNEQDIVSRVQAYITTQGSAGALVHTPEKTYDIPPAHTRRVVDPTGCGDAFRAGLIYGIQHNYDWLTIGRMGNLMGALKVEHPGTQNQRFDFAEFNFQFKQYFGYAL

SEQ ID NO: 1109 - DNA, 963 bp, synthetic construct
  misc_feature 1..963: note = Variant of adenosine kinase
  source 1..963: mol_type = other DNA
atgcaccatcatcaccatcacgggggctccggcatgagtgcactgatttgcggttctttagcgtatgataccatcatggtgtttccggaccagttcaagaaccatattctgcccgatcgtgttcaccgcctcaatgtcagctttcttgtaccacgcatgcgtcgtgaatttggaggctgtgccggcaacattgcgtacaatctgcatctgttgggtggtgctccgatcgtaatggctacggtgggccaagatttcggtccgtatcgcgagcacttcgaaactctgggcattgacttatcccgcgtcaagatcatcgatgatctgagtacaccgcaggccttcattaccaccgacatggatcataaccagattacggcgtttcatggcggcgcaatgatgcgttcgtacgaaaatcacgttcgtgatgtgccgggtattaccttgggcctcgtaggtcctgatggacgcgagggcatgatccaaaatgccgaagaatttgctgctggtggcattccgttcatttttgacccaggtcaggcactgccgctgttcaacggccccgaactgcgcgagtttatcgaacaggcggactatgtggtggtcaacgattacgaaagcaatcttcttcaaacgcgtactggctggaacgagcaggacattgtttcacgcgtgcaggcgtatatcaccacgcaaggttcggctggagccctggtacatacaccggagaagacctacgatattccgccggctcacacccgtcgtgtcgttgatccaactggttgcggcgacgcgtttcgcgccggcctgatctatggtattcagcataattatgattggttgaccattggccgcatgggaaacttaatgggtgcgctgaaagtggaacaccctggcacccaaaatcagcgtttcgattttgccgaattcaacgaccagttcaaacaatattttggctacgcgctc

SEQ ID NO: 1110 - protein, 321 aa, synthetic construct
  REGION 1..321: note = Variant of adenosine kinase
MHHHHHHGGSGMSALICGSLAYDTIMVFPDQFKNHILPDRVHRLNVSFLVPRMRREFGGCAGNIAYNLHLLGGAPIVMATVGQDFGPYREHFETLGIDLSRVKIIDDLSTPQAFITTDMDHNQITAFHGGAMMRSYENHVRDVPGITLGLVGPDGREGMIQNAEEFAAGGIPFIFDPGQALPLFNGPELREFIEQADYVVVNDYESNLLQTRTGWNEQDIVSRVQAYITTQGSAGALVHTPEKTYDIPPAHTRRVVDPTGCGDAFRAGLIYGIQHNYDWLTIGRMGNLMGALKVEHPGTQNQRFDFAEFNDQFKQYFGYAL

SEQ ID NO: 1111 - DNA, 963 bp, synthetic construct
  misc_feature 1..963: note = Variant of adenosine kinase
  source 1..963: mol_type = other DNA
atgcaccatcatcaccatcacgggggctccggcatgagtgcactgatttgcggttctttagcgtatgataccatcatggtgtttccggaccagttcaagaaccatattctgcccgatcgtgttcaccgcctcaatgtcagctttcttgtaccacgcatgcgtcgtgaatttggaggctgtgccggcaacattgcgtacaatctgcatctgttgggtggtgctccgatcgtaatggctacggtgggctcggatttcggtccgtatcgcgagcacttcgaaactctgggcattgacttatcccgcgtcaagatcatcgatgatctgagtacaccgcaggccttcattaccaccgacatggatcataaccagattacggcgtttcatggcggcgcaatgatgcgttcgtacgaaaatcacgttcgtgatgtgccgggtgttaccttgggcctcgtaggtcctgatggacgcgagggcatgatccaaaatgccgaagaatttgctgctggtggcattccgttcatttttgacccaggtcaggcactgccgctgttcaacggccccgaactgcgcgagtttatcgaacaggcggactatgtggtggtcaacgattacgaaagcaatcttcttcaaacgcgtactggctggaacgagcaggacattgtttcacgcgtgcaggcgtatatcaccacgcaaggttcggctggagccctggtacatacaccggagaagacctacgatattccgccggctcacacccgtcgtgtcgttgatccaactggttgcggcgacgcgtttcgcgccggcctgatctatggtattcagcataattatgattggttgaccattggccgcatgggaaacttaatgggtgcgctgaaagtggaacaccctggcacccaaaatcagcgtttcgattttgccgaattcaacgaccagttcaaacaatattttggctacgcgctc

SEQ ID NO: 1112 - protein, 321 aa, synthetic construct
  REGION 1..321: note = Variant of adenosine kinase
MHHHHHHGGSGMSALICGSLAYDTIMVFPDQFKNHILPDRVHRLNVSFLVPRMRREFGGCAGNIAYNLHLLGGAPIVMATVGSDFGPYREHFETLGIDLSRVKIIDDLSTPQAFITTDMDHNQITAFHGGAMMRSYENHVRDVPGVTLGLVGPDGREGMIQNAEEFAAGGIPFIFDPGQALPLFNGPELREFIEQADYVVVNDYESNLLQTRTGWNEQDIVSRVQAYITTQGSAGALVHTPEKTYDIPPAHTRRVVDPTGCGDAFRAGLIYGIQHNYDWLTIGRMGNLMGALKVEHPGTQNQRFDFAEFNDQFKQYFGYAL

SEQ ID NO: 1113 - DNA, 963 bp, synthetic construct
  misc_feature 1..963: note = Variant of adenosine kinase
  source 1..963: mol_type = other DNA
atgcaccatcatcaccatcacgggggctccggcatgagtgcactgatttgcggttctttagcgtatgataccatcatggtgtttccggaccagttcaagaaccatattctgcccgatcgtgttcaccgcctcaatgtcagctttcttgtaccacgcatgcgtcgtgaatttggaggctgtgccggcaacattgcgtacaatctgcatctgttgggtggtgctccgatcgtaatggctacggtgggccaagatttcggtccgtatcgcgagcacttcgaaactctgggcattgacttatcccgcgtcaagatcatcgatgatctgagtacaccgcaggccttcattaccaccgacatggatcataaccagattacggcgtttcatggcggcgcaatgatgcgttcgtacgaaaatcacgttcgtgatgtgccgggtgttaccttgggcctcgtaggtcctgatggacgcgagggcatgatccaaaatgccgaagaatttgctgctggtggcattccgttcatttttgacccaggtcaggcactgccgctgttcaacggccccgaactgcgcgagtttatcgaacaggcggactatgtggtggtcaacgattacgaaagcaatcttcttcaaacgcgtactggctggaacgagcaggacattgtttcacgcgtgcaggcgtatatcaccacgcaaggttcggctggagccctggtacatacaccggagaggacctacgatattccgccggctcacacccgtcgtgtcgttgatccaactggttgcggcgacgcgtttcgcgccggcctgatctatggtattcagcataattatgattggttgaccattggccgcatgggaaacttaatgggtgcgctgaaagtggaacaccctggcacccaaaatcagcgtttcgattttgccgaattcaacgaccagttcaaacaatattttggctacgcgctc

SEQ ID NO: 1114 - protein, 321 aa, synthetic construct
  REGION 1..321: note = Variant of adenosine kinase
MHHHHHHGGSGMSALICGSLAYDTIMVFPDQFKNHILPDRVHRLNVSFLVPRMRREFGGCAGNIAYNLHLLGGAPIVMATVGQDFGPYREHFETLGIDLSRVKIIDDLSTPQAFITTDMDHNQITAFHGGAMMRSYENHVRDVPGVTLGLVGPDGREGMIQNAEEFAAGGIPFIFDPGQALPLFNGPELREFIEQADYVVVNDYESNLLQTRTGWNEQDIVSRVQAYITTQGSAGALVHTPERTYDIPPAHTRRVVDPTGCGDAFRAGLIYGIQHNYDWLTIGRMGNLMGALKVEHPGTQNQRFDFAEFNDQFKQYFGYAL

SEQ ID NO: 1115 - DNA, 963 bp, synthetic construct
  misc_feature 1..963: note = Variant of adenosine kinase
  source 1..963: mol_type = other DNA
atgcaccatcatcaccatcacgggggctccggcatgagtgcactgatttgcggttctttagcgtatgataccatcatggtgtttccggaccagttcaagaaccatattctgcccgatcgtgttcaccgcctcaatgtcagctttcttgtaccacgcatgcgtcgtgaatttggaggctgtgccggcaacattgcgtacaatctgcatctgttgggtggtacgccgatcgtaatggctacggtgggccaagatttcggtccgtatcgcgagcacttcgaaactctgggcattgacttatcccgcgtcaagatcatcgatgatctgagtacaccgcaggccttcattaccaccgacatggatcataaccagattacggcgtttcatggcggcgcaatgatgcgttcgtacgaaaatcacgttcgtgatgtgccgggtgttaccttgggcctcgtaggtcctgatggacgcgagggcatgatccaaaatgccgaagaatttgctgctggtggcattccgttcatttttgacccaggtcaggcactgccgctgttcaacggccccgaactgcgcgagtttatcgaacaggcggactatgtggtggtcaacgattacgaaagcaatcttcttcaaacgcgtactggctggaacgagcaggacattgtttcacgcgtgcaggcgtatatcaccacgcaaggttcggctggagccctggtacatacaccggagaagacctacgatattccgccggctcacacccgtcgtgtcgttgatccaactggttgcggcgacgcgtttcgcgccggcctgatctatggtattcagcataattatgattggttgaccattggccgcatgggaaacttaatgggtgcgctgaaagtggaacaccctggcacccaaaatcagcgtttcgattttgccgaattcaacgaccagttcaaacaatattttggctacgcgctc

SEQ ID NO: 1116 - protein, 321 aa, synthetic construct
  REGION 1..321: note = Variant of adenosine kinase
MHHHHHHGGSGMSALICGSLAYDTIMVFPDQFKNHILPDRVHRLNVSFLVPRMRREFGGCAGNIAYNLHLLGGTPIVMATVGQDFGPYREHFETLGIDLSRVKIIDDLSTPQAFITTDMDHNQITAFHGGAMMRSYENHVRDVPGVTLGLVGPDGREGMIQNAEEFAAGGIPFIFDPGQALPLFNGPELREFIEQADYVVVNDYESNLLQTRTGWNEQDIVSRVQAYITTQGSAGALVHTPEKTYDIPPAHTRRVVDPTGCGDAFRAGLIYGIQHNYDWLTIGRMGNLMGALKVEHPGTQNQRFDFAEFNDQFKQYFGYAL

SEQ ID NO: 1117 - DNA, 963 bp, synthetic construct
  misc_feature 1..963: note = Variant of adenosine kinase
  source 1..963: mol_type = other DNA
atgcaccatcatcaccatcacgggggctccggcatgagtgcactgatttgcggttctttagcgtatgataccatcatggtgtttccggaccagttcaagaaccatattctgcccgatcgtgttcaccgcctcaatgtcagctttcttgtaccacgcatgcgtcgtgaatttggaggctgtgccggcaacattgcgtacaatctgcatctgttgggtggtgctccgatcgtaatggctacggtgggccaagatttcggtccgtatcgcgagcacttcgaaactctgggcattgacttatcccgcgtcaagatcatcgatgatctgagtacaccgcaggccttcattaccaccgacatggatcataaccagattacggcgtttcatggcggcgcaatgatgcgttcgtacgaaaatcacgttcgtgatgtgccgggtgttaccttgggcctcgtaggtcctgatggacgcgagggcatgatccaaaatgccgaagaatttgctgctggtggcattccgttcatttttgacccaggtcaggcactgccgctgttcaacggccccgaactgcgcgagtttatcgaacaggcggactatgtggtggtcaacgattacgaaagcaatcttcttcaaacgcgtactggctggaacgagcaggacattgtttcacgcgtgcaggcgtatatcaccacgcaaggttcggctggagccctggtacatacaccggagaagacctacgatattccgccggctcacacccgtcgtgtcgttgatccaactggttgcggcgacgcgtttcgcgccggcctgatctatggtattcagcataattatgattggttgaccattggccgcatgggaaacttaatgggtgcgctgaaagtggaacaccctggcacccaaaatcagcgtttcgattttgccgaattcaacacgcagttcaaacaatattttggctacgcgctc

SEQ ID NO: 1118 - protein, 321 aa, synthetic construct
  REGION 1..321: note = Variant of adenosine kinase
MHHHHHHGGSGMSALICGSLAYDTIMVFPDQFKNHILPDRVHRLNVSFLVPRMRREFGGCAGNIAYNLHLLGGAPIVMATVGQDFGPYREHFETLGIDLSRVKIIDDLSTPQAFITTDMDHNQITAFHGGAMMRSYENHVRDVPGVTLGLVGPDGREGMIQNAEEFAAGGIPFIFDPGQALPLFNGPELREFIEQADYVVVNDYESNLLQTRTGWNEQDIVSRVQAYITTQGSAGALVHTPEKTYDIPPAHTRRVVDPTGCGDAFRAGLIYGIQHNYDWLTIGRMGNLMGALKVEHPGTQNQRFDFAEFNTQFKQYFGYAL

SEQ ID NO: 1119 - DNA, 963 bp, synthetic construct
  misc_feature 1..963: note = Variant of adenosine kinase
  source 1..963: mol_type = other DNA
atgcaccatcatcaccatcacgggggctccggcatgagtgcactgatttgcggttctttagcgtatgataccatcatggtgtttccggaccagttcaagaaccatattctgcccgatcgtgttcaccgcctcaatgtcagctttcttgtaccacgcatgcgtcgtgaatttggaggctgtgccggcaacattgcgtacaatctgcatctgttgggtggtgctccgatcgtaatggctacggtgggccaagatttcggtccgtatcgcgagcacttcgaaactctgggcattgacttatcccgcgtcaagatcatcgatgatctgagtacaccgcaggccttcattaccaccgacatggatcataaccagattacggcgtttcatggcggcgcaatgatgcgttcgtacgaaaatcacgttcgtgatgtgccgggtgttaccttgggcctcgtaggtcctgatggacgcgagggcatgatccaaaatgccgaagaatttgctgctggtggcattccgttcatttttgacccaggtcaggcactgccgctgttcaacggccccgaactgcgcgagtttatcgaacaggcggactatgtggtggtcaacgattacgaaagcaatcttcttcaaacgcgtactggctggaacgagaatgacattgtttcacgcgtgcaggcgtatatcaccacgcaaggttcggctggagccctggtacatacaccggagaagacctacgatattccgccggctcacacccgtcgtgtcgttgatccaactggttgcggcgacgcgtttcgcgccggcctgatctatggtattcagcataattatgattggttgaccattggccgcatgggaaacttaatgggtgcgctgaaagtggaacaccctggcacccaaaatcagcgtttcgattttgccgaattcaacgaccagttcaaacaatattttggctacgcgctc

SEQ ID NO: 1120 - protein, 321 aa, synthetic construct
  REGION 1..321: note = Variant of adenosine kinase
MHHHHHHGGSGMSALICGSLAYDTIMVFPDQFKNHILPDRVHRLNVSFLVPRMRREFGGCAGNIAYNLHLLGGAPIVMATVGQDFGPYREHFETLGIDLSRVKIIDDLSTPQAFITTDMDHNQITAFHGGAMMRSYENHVRDVPGVTLGLVGPDGREGMIQNAEEFAAGGIPFIFDPGQALPLFNGPELREFIEQADYVVVNDYESNLLQTRTGWNENDIVSRVQAYITTQGSAGALVHTPEKTYDIPPAHTRRVVDPTGCGDAFRAGLIYGIQHNYDWLTIGRMGNLMGALKVEHPGTQNQRFDFAEFNDQFKQYFGYAL

SEQ ID NO: 1121 - DNA, 963 bp, synthetic construct
  misc_feature 1..963: note = Variant of adenosine kinase
  source 1..963: mol_type = other DNA
atgcaccatcatcaccatcacgggggctccggcatgagtgcactgatttgcggttctttagcgtatgataccatcatggtgtttccggaccagttcaagaaccatattctgcccgatcgtgttcaccgcctcaatgtcagctttcttgtaccacgcatgcgtcgtgaatttggaggctgtgccggcaacattgcgtacaatctgcatctgttgggtggttttccgatcgtaatggctacggtgggccaagatttcggtccgtatcgcgagcacttcgaaactctgggcattgacttatcccgcgtcaagatcatcgatgatctgagtacaccgcaggccttcattaccaccgacatggatcataaccagattacggcgtttcatggcggcgcaatgatgcgttcgtacgaaaatcacgttcgtgatgtgccgggtgttaccttgggcctcgtaggtcctgatggacgcgagggcatgatccaaaatgccgaagaatttgctgctggtggcattccgttcatttttgacccaggtcaggcactgccgctgttcaacggccccgaactgcgcgagtttatcgaacaggcggactatgtggtggtcaacgattacgaaagcaatcttcttcaaacgcgtactggctggaacgagcaggacattgtttcacgcgtgcaggcgtatatcaccacgcaaggttcggctggagccctggtacatacaccggagaagacctacgatattccgccggctcacacccgtcgtgtcgttgatccaactggttgcggcgacgcgtttcgcgccggcctgatctatggtattcagcataattatgattggttgaccattggccgcatgggaaacttaatgggtgcgctgaaagtggaacaccctggcacccaaaatcagcgtttcgattttgccgaattcaacgaccagttcaaacaatattttggctacgcgctc

SEQ ID NO: 1122 - protein, 321 aa, synthetic construct
  REGION 1..321: note = Variant of adenosine kinase
MHHHHHHGGSGMSALICGSLAYDTIMVFPDQFKNHILPDRVHRLNVSFLVPRMRREFGGCAGNIAYNLHLLGGFPIVMATVGQDFGPYREHFETLGIDLSRVKIIDDLSTPQAFITTDMDHNQITAFHGGAMMRSYENHVRDVPGVTLGLVGPDGREGMIQNAEEFAAGGIPFIFDPGQALPLFNGPELREFIEQADYVVVNDYESNLLQTRTGWNEQDIVSRVQAYITTQGSAGALVHTPEKTYDIPPAHTRRVVDPTGCGDAFRAGLIYGIQHNYDWLTIGRMGNLMGALKVEHPGTQNQRFDFAEFNDQFKQYFGYAL

SEQ ID NO: 1123 - DNA, 963 bp, synthetic construct
  misc_feature 1..963: note = Variant of adenosine kinase
  source 1..963: mol_type = other DNA
atgcaccatcatcaccatcacgggggctccggcatgagtgcactgatttgcggttctttagcgtatgataccatcatggtgtttccggaccagttcaagaaccatattctgcccgatcgtgttcaccgcctcaatgtcagctttcttgtaccacgcatgcgtcgtgaatttggaggctgtgccggcaacattgcgtacaatctgcatctgttgggtggtgctccgatcgtaatggctacggtgggccaagatttcggtccgtatcgcgagcacttcgaaactctgggcattgacttatcccgcgtcaagatcatcgatgatctgagtacaccgcaggccttcattaccaccgacatggatcataaccagattacggcgtttcatggcggcgcaatgatgcgttcgtacgaaaatcacgttcgtgatgtgccgggtgttaccttgggcctcgtaggtcctgatggacgcgagggcatgatccaaaatgccgaagaatttgctgctggtggcattccgttcatttttgacccaggtcaggcactgccgctgttcaacggccccgaactgcgcgagtttatcgaacaggcggactatgtggtggtcaacgattacgaaagcaatcttcttcaaacgcgtactggctggaacgagcaggacattgtttcacgcgtgcaggcgtatatcaccacgcaaggttcggctggagccctggtacatacaccggagaagacctacgatattccgccggctcacacccgtcgtgtcgttgatccaactggttgcggcgacgcgtttcgcgccggcctgatctatggtattcagcataattatgattggttgaccattggccgcatgggaaacttaatgggtgcgctgaaagtggaacaccctggcacgcaaaatcaggtgttcgattttgccgaattcaacgaccagttcaaacaatattttggctacgcgctc

SEQ ID NO: 1124 - protein, 321 aa, synthetic construct
  REGION 1..321: note = Variant of adenosine kinase
MHHHHHHGGSGMSALICGSLAYDTIMVFPDQFKNHILPDRVHRLNVSFLVPRMRREFGGCAGNIAYNLHLLGGAPIVMATVGQDFGPYREHFETLGIDLSRVKIIDDLSTPQAFITTDMDHNQITAFHGGAMMRSYENHVRDVPGVTLGLVGPDGREGMIQNAEEFAAGGIPFIFDPGQALPLFNGPELREFIEQADYVVVNDYESNLLQTRTGWNEQDIVSRVQAYITTQGSAGALVHTPEKTYDIPPAHTRRVVDPTGCGDAFRAGLIYGIQHNYDWLTIGRMGNLMGALKVEHPGTQNQVFDFAEFNDQFKQYFGYAL

SEQ ID NO: 1125 - DNA, 963 bp, synthetic construct
  misc_feature 1..963: note = Variant of adenosine kinase
  source 1..963: mol_type = other DNA
atgcaccatcatcaccatcacgggggctccggcatgagtgcactgatttgcggttctttagcgtatgataccatcatggtgtttccggaccagttcaagaaccatattctgcccgatcgtgttcaccgcctcaatgtcagctttcttgtaccacgcatgcgtcgtgaatttggaggctgtgccggcaacattgcgtacaatctgcatctgttgggtggtgctccgatcgtaatggctacggtgggctttgatttcggtccgtatcgcgagcacttcgaaactctgggcattgacttatcccgcgtcaagatcatcgatgatctgagtacaccgcaggccttcattaccaccgacatggatcataaccagattacggcgtttcatggcggcgcaatgatgcgttcgtacgaaaatcacgttcgtgatgtgccgggtgttaccttgggcctcgtaggtcctgatggacgcgagggcatgatccaaaatgccgaagaatttgctgctggtggcattccgttcatttttgacccaggtcaggcactgccgctgttcaacggccccgaactgcgcgagtttatcgaacaggcggactatgtggtggtcaacgattacgaaagcaatcttcttcaaacgcgtactggctggaacgagcaggacattgtttcacgcgtgcaggcgtatatcaccacgcaaggttcggctggagccctggtacatacaccggagaagacctacgatattccgccggctcacacccgtcgtgtcgttgatccaactggttgcggcgacgcgtttcgcgccggcctgatctatggtattcagcataattatgattggttgaccattggccgcatgggaaacttaatgggtgcgctgaaagtggaacaccctggcacccaaaatcagcgtttcgattttgccgaattcaacgaccagttcaaacaatattttggctacgcgctc

SEQ ID NO: 1126 - protein, 321 aa, synthetic construct
  REGION 1..321: note = Variant of adenosine kinase
MHHHHHHGGSGMSALICGSLAYDTIMVFPDQFKNHILPDRVHRLNVSFLVPRMRREFGGCAGNIAYNLHLLGGAPIVMATVGFDFGPYREHFETLGIDLSRVKIIDDLSTPQAFITTDMDHNQITAFHGGAMMRSYENHVRDVPGVTLGLVGPDGREGMIQNAEEFAAGGIPFIFDPGQALPLFNGPELREFIEQADYVVVNDYESNLLQTRTGWNEQDIVSRVQAYITTQGSAGALVHTPEKTYDIPPAHTRRVVDPTGCGDAFRAGLIYGIQHNYDWLTIGRMGNLMGALKVEHPGTQNQRFDFAEFNDQFKQYFGYAL

SEQ ID NO: 1127 - DNA, 963 bp, synthetic construct
  misc_feature 1..963: note = Variant of adenosine kinase
  source 1..963: mol_type = other DNA
atgcaccatcatcaccatcacgggggctccggcatgagtgcactgatttgcggttctttagcgtatgataccatcatggtgtttccggaccagttcaagaaccatattctgcccgatcgtgttcaccgcctcaatgtcagctttcttgtaccacgcatgcgtcgtgaatttggaggctgtgccggcaacattgcgtacaatctgcatctgttgggtggtgctccgatcgtaatggctacggtgggccaagatttcggtccgtatcgcgttcacttcgaaactctgggcattgacttatcccgcgtcaagatcatcgatgatctgagtacaccgcaggccttcattaccaccgacatggatcataaccagattacggcgtttcatggcggcgcaatgatgcgttcgtacgaaaatcacgttcgtgatgtgccgggtgttaccttgggcctcgtaggtcctgatggacgcgagggcatgatccaaaatgccgaagaatttgctgctggtggcattccgttcatttttgacccaggtcaggcactgccgctgttcaacggccccgaactgcgcgagtttatcgaacaggcggactatgtggtggtcaacgattacgaaagcaatcttcttcaaacgcgtactggctggaacgagcaggacattgtttcacgcgtgcaggcgtatatcaccacgcaaggttcggctggagccctggtacatacaccggagaagacctacgatattccgccggctcacacccgtcgtgtcgttgatccaactggttgcggcgacgcgtttcgcgccggcctgatctatggtattcagcataattatgattggttgaccattggccgcatgggaaacttaatgggtgcgctgaaagtggaacaccctggcacccaaaatcagcgtttcgattttgccgaattcaacgaccagttcaaacaatattttggctacgcgctc

SEQ ID NO: 1128 - protein, 321 aa, synthetic construct
  REGION 1..321: note = Variant of adenosine kinase
MHHHHHHGGSGMSALICGSLAYDTIMVFPDQFKNHILPDRVHRLNVSFLVPRMRREFGGCAGNIAYNLHLLGGAPIVMATVGQDFGPYRVHFETLGIDLSRVKIIDDLSTPQAFITTDMDHNQITAFHGGAMMRSYENHVRDVPGVTLGLVGPDGREGMIQNAEEFAAGGIPFIFDPGQALPLFNGPELREFIEQADYVVVNDYESNLLQTRTGWNEQDIVSRVQAYITTQGSAGALVHTPEKTYDIPPAHTRRVVDPTGCGDAFRAGLIYGIQHNYDWLTIGRMGNLMGALKVEHPGTQNQRFDFAEFNDQFKQYFGYAL

SEQ ID NO: 1129 - DNA, 963 bp, synthetic construct
  misc_feature 1..963: note = Variant of adenosine kinase
  source 1..963: mol_type = other DNA
atgcaccatcatcaccatcacgggggctccggcatgagtgcactgatttgcggttctttagcgtatgataccatcatggtgtttccggaccagttcaagaaccatattctgcccgatcgtgttcaccgcctcaatgtcagctttcttgtaccacgcatgcgtcgtgaatttggaggctgtgccggcaacattgcgtacaatctgcatctgttgggtggtaagccgatcgtaatggctacggtgggccaagatttcggtccgtatcgcgagcacttcgaaactctgggcattgacttatcccgcgtcaagatcatcgatgatctgagtacaccgcaggccttcattaccaccgacatggatcataaccagattacggcgtttcatggcggcgcaatgatgcgttcgtacgaaaatcacgttcgtgatgtgccgggtgttaccttgggcctcgtaggtcctgatggacgcgagggcatgatccaaaatgccgaagaatttgctgctggtggcattccgttcatttttgacccaggtcaggcactgccgctgttcaacggccccgaactgcgcgagtttatcgaacaggcggactatgtggtggtcaacgattacgaaagcaatcttcttcaaacgcgtactggctggaacgagcaggacattgtttcacgcgtgcaggcgtatatcaccacgcaaggttcggctggagccctggtacatacaccggagaagacctacgatattccgccggctcacacccgtcgtgtcgttgatccaactggttgcggcgacgcgtttcgcgccggcctgatctatggtattcagcataattatgattggttgaccattggccgcatgggaaacttaatgggtgcgctgaaagtggaacaccctggcacccaaaatcagcgtttcgattttgccgaattcaacgaccagttcaaacaatattttggctacgcgctc

SEQ ID NO: 1130 - protein, 321 aa, synthetic construct
  REGION 1..321: note = Variant of adenosine kinase
MHHHHHHGGSGMSALICGSLAYDTIMVFPDQFKNHILPDRVHRLNVSFLVPRMRREFGGCAGNIAYNLHLLGGKPIVMATVGQDFGPYREHFETLGIDLSRVKIIDDLSTPQAFITTDMDHNQITAFHGGAMMRSYENHVRDVPGVTLGLVGPDGREGMIQNAEEFAAGGIPFIFDPGQALPLFNGPELREFIEQADYVVVNDYESNLLQTRTGWNEQDIVSRVQAYITTQGSAGALVHTPEKTYDIPPAHTRRVVDPTGCGDAFRAGLIYGIQHNYDWLTIGRMGNLMGALKVEHPGTQNQRFDFAEFNDQFKQYFGYAL

SEQ ID NO: 1131 - DNA, 963 bp, synthetic construct
  misc_feature 1..963: note = Variant of adenosine kinase
  source 1..963: mol_type = other DNA
atgcaccatcatcaccatcacgggggctccggcatgagtgcactgatttgcggttctttagcgtatgataccatcatggtgtttccggaccagttcaagaaccatattctgcccgatcgtgttcaccgcctcaatgtcagctttcttgtaccacgcatgcgtcgtgaatttggaggctgtgccggcaacattgcgtacaatctgcatctgttgggtggtgctccgatcgtaatggctacggtgggccaagatttcggtccgtatcgcgagcacttcgaaactctgggcattgacttatcccgcgtcaagatcatcgatgatctgagtacaccgcaggccttcattaccaccgacatggatcataaccagattacggcgtttcatggcggcgcaatgatgcgttcgtacgaaaatcacgttcgtgatgtgccgggtgttaccttgggcctcgtaggtcctgatggacgcgagggcatgatccaaaatgccgaagaatttgctgctggtggcattccgttcatttttgacccaggtcaggcactgccgctgttcaacggccccgaactgcgcgagtttatcgaacaggcggactatgtggtggtcaacgattacgaaagcaatcttcttcaaacgcgtactggctggaacgagcaggacattgtttcacgcgtgcaggcgtatatcaccacgcaaggttcggctggagccctggtacatacaccggagaagacctacgatattccgccggctcacacccgtcgtgtcgttgatccaactggttgcggcgacgcgtttcgcgccggcctgatctatggtattcagcataattatgattggttgaccattggccgcatgggaaacttaatgggtgcgctgaaagtggaacaccctggcacgcaaaatcagtttttcgattttgccgaattcaacgaccagttcaaacaatattttggctacgcgctc

SEQ ID NO: 1132 - protein, 321 aa, synthetic construct
  REGION 1..321: note = Variant of adenosine kinase
MHHHHHHGGSGMSALICGSLAYDTIMVFPDQFKNHILPDRVHRLNVSFLVPRMRREFGGCAGNIAYNLHLLGGAPIVMATVGQDFGPYREHFETLGIDLSRVKIIDDLSTPQAFITTDMDHNQITAFHGGAMMRSYENHVRDVPGVTLGLVGPDGREGMIQNAEEFAAGGIPFIFDPGQALPLFNGPELREFIEQADYVVVNDYESNLLQTRTGWNEQDIVSRVQAYITTQGSAGALVHTPEKTYDIPPAHTRRVVDPTGCGDAFRAGLIYGIQHNYDWLTIGRMGNLMGALKVEHPGTQNQFFDFAEFNDQFKQYFGYAL

SEQ ID NO: 1133 - DNA, 963 bp, synthetic construct
  misc_feature 1..963: note = Variant of adenosine kinase
  source 1..963: mol_type = other DNA
atgcaccatcatcaccatcacgggggctccggcatgagtgcactgatttgcggttctttagcgtatgataccatcatggtgtttccggaccagttcaagaaccatattctgcccgatcgtgttcaccgcctcaatgtcagctttcttgtaccacgcatgcgtcgtgaatttggaggctgtgccggcaacattgcgtacaatctgcatctgttgggtggtgctccgatcgtaatggctacggtgggccaagatttcggtccgtatcgcgagcacttcgaaactctgggcattgacttatcccgcgtcaagatcatcgatgatctgagtacaccgcaggccttcattaccaccgacatggatcataaccagattacggcgtttcatggcggcgcaatgatgcgttcgtacgaaaatcacgttcgtgatgtgccgggtgttaccttgggcctcgtaggtcctgatggacgcgagggcatgatccaaaatgccgaagaatttgctgctggtggcattccgttcatttttgacccaggtcaggcactgccgctgttcaacggccccgaactgcgcgagtttatcgaacaggcggactatgtggtggtcaacgattacgaaagcaatcttcttcaaacgcgtactggctggaacgagcaggacattgtttcacgcgtgcaggcgtatatcaccacgcaaggttcggctggagccctggtacatacaccggagaagacctacgatattccgccggctcacacccgtcgtgtcgttgatccaactggttgcggcgacgcgtttcgcgccggcctgatctatggtattcagcataattatgattggttgaccattggccgcatgggaaacttaatgggtgcgctgaaagtggaacaccctggcacccaaaatcagcgtttcgattttgccgaattcgcggaccagttcaaacaatattttggctacgcgctc

SEQ ID NO: 1134 - protein, 321 aa, synthetic construct
  REGION 1..321: note = Variant of adenosine kinase
MHHHHHHGGSGMSALICGSLAYDTIMVFPDQFKNHILPDRVHRLNVSFLVPRMRREFGGCAGNIAYNLHLLGGAPIVMATVGQDFGPYREHFETLGIDLSRVKIIDDLSTPQAFITTDMDHNQITAFHGGAMMRSYENHVRDVPGVTLGLVGPDGREGMIQNAEEFAAGGIPFIFDPGQALPLFNGPELREFIEQADYVVVNDYESNLLQTRTGWNEQDIVSRVQAYITTQGSAGALVHTPEKTYDIPPAHTRRVVDPTGCGDAFRAGLIYGIQHNYDWLTIGRMGNLMGALKVEHPGTQNQRFDFAEFADQFKQYFGYAL

SEQ ID NO: 1135 - DNA, 963 bp, synthetic construct
  misc_feature 1..963: note = Variant of adenosine kinase
  source 1..963: mol_type = other DNA
atgcaccatcatcaccatcacgggggctccggcatgagtgcactgatttgcggttctttagcgtatgataccatcatggtgtttccggaccagttcaagaaccatattctgcccgatcgtgttcaccgcctcaatgtcagctttcttgtaccacgcatgcgtcgtgaatttggaggctgtgccggcaacattgcgtacaatctgcatctgttgggtggtgctccgatcgtaatggctacggtgggccaagatttcggtccgtatcgcgagcacttcgaaactctgggcattgacttatcccgcgtcaagatcatcgatgatctgagtacaccgcaggccttcattaccaccgacatggatcataaccagattacggcgtttcatggcggcgcaatgatgcgttcgtacgaaaatcacgttcgtgatgtgccgggtgttaccttgggcctcgtaggtcctgatggacgcgagggcatgatccaaaatgccgaagaatttgctgctggtggcattccgttcatttttgacccaggtcaggcactgccgctgttcaacggccccgaactgcgcgagtttatcgaacaggcggactatgtggtggtcaacgattacgaaagcaatcttcttcaaacgcgtactggctggaacgagcaggacattgtttcacgcgtgcaggcgtatatcaccacgcaaggttcggctggagccctggtacatacaccggagggtacctacgatattccgccggctcacacccgtcgtgtcgttgatccaactggttgcggcgacgcgtttcgcgccggcctgatctatggtattcagcataattatgattggttgaccattggccgcatgggaaacttaatgggtgcgctgaaagtggaacaccctggcacccaaaatcagcgtttcgattttgccgaattcaacgaccagttcaaacaatattttggctacgcgctc

SEQ ID NO: 1136 - protein, 321 aa, synthetic construct
  REGION 1..321: note = Variant of adenosine kinase
MHHHHHHGGSGMSALICGSLAYDTIMVFPDQFKNHILPDRVHRLNVSFLVPRMRREFGGCAGNIAYNLHLLGGAPIVMATVGQDFGPYREHFETLGIDLSRVKIIDDLSTPQAFITTDMDHNQITAFHGGAMMRSYENHVRDVPGVTLGLVGPDGREGMIQNAEEFAAGGIPFIFDPGQALPLFNGPELREFIEQADYVVVNDYESNLLQTRTGWNEQDIVSRVQAYITTQGSAGALVHTPEGTYDIPPAHTRRVVDPTGCGDAFRAGLIYGIQHNYDWLTIGRMGNLMGALKVEHPGTQNQRFDFAEFNDQFKQYFGYAL

SEQ ID NO: 1137 - DNA, 963 bp, synthetic construct
  misc_feature 1..963: note = Variant of adenosine kinase
  source 1..963: mol_type = other DNA
atgcaccatcatcaccatcacgggggctccggcatgagtgcactgatttgcggttctttagcgtatgataccatcatggtgtttccggaccagttcaagaaccatattctgcccgatcgtgttcaccgcctcaatgtcagctttcttgtaccacgcatgcgtcgtgaatttggaggctgtgccggcaacattgcgtacaatctgcatctgttgggtggtgctccgatcgtaatggctacggtgggccaagatttcggtccgtatcgcgagcacttcgaaactctgggcattgacttatcccgcgtcaagatcatcgatgatctgagtacaccgcaggccttcattaccaccgacatggatcataaccagattacggcgtttcatggcggcgcaatgatgcgttcgtacgaaaatcacgttcgtgatgtgccgggtgttaccttgggcctcgtaggtcctgatggacgcgagggcatgatccaaaatgccgaagaatttgctgctggtggcattccgttcatttttgacccaggtcaggcactgccgctgttcaacggccccgaactgcgcgagtttatcgaacaggcggactatgtggtggtcaacgattacgaaagcaatcttcttcaaacgcgtactggctggaacgagcaggacattgttgcgcgcgtgcaggcgtatatcaccacgcaaggttcggctggagccctggtacatacaccggagaagacctacgatattccgccggctcacacccgtcgtgtcgttgatccaactggttgcggcgacgcgtttcgcgccggcctgatctatggtattcagcataattatgattggttgaccattggccgcatgggaaacttaatgggtgcgctgaaagtggaacaccctggcacccaaaatcagcgtttcgattttgccgaattcaacgaccagttcaaacaatattttggctacgcgctc

SEQ ID NO: 1138 - protein, 321 aa, synthetic construct
  REGION 1..321: note = Variant of adenosine kinase
MHHHHHHGGSGMSALICGSLAYDTIMVFPDQFKNHILPDRVHRLNVSFLVPRMRREFGGCAGNIAYNLHLLGGAPIVMATVGQDFGPYREHFETLGIDLSRVKIIDDLSTPQAFITTDMDHNQITAFHGGAMMRSYENHVRDVPGVTLGLVGPDGREGMIQNAEEFAAGGIPFIFDPGQALPLFNGPELREFIEQADYVVVNDYESNLLQTRTGWNEQDIVARVQAYITTQGSAGALVHTPEKTYDIPPAHTRRVVDPTGCGDAFRAGLIYGIQHNYDWLTIGRMGNLMGALKVEHPGTQNQRFDFAEFNDQFKQYFGYAL

SEQ ID NO: 1139 - DNA, 963 bp, synthetic construct
  misc_feature 1..963: note = Variant of adenosine kinase
  source 1..963: mol_type = other DNA
atgcaccatcatcaccatcacgggggctccggcatgagtgcactgatttgcggttctttagcgtatgataccatcatggtgtttccggaccagttcaagaaccatattctgcccgatcgtgttcacagtctcaatgtcagctttcttgtaccacgcatgcgtcgtgaatttggaggctgtgccggcaacattgcgtacaatctgcatctgttgggtggtgctccgatcgtaatggctacggtgggccaagatttcggtccgtatcgcgagcacttcgaaactctgggcattgacttatcccgcgtcaagatcatcgatgatctgagtacaccgcaggccttcattaccaccgacatggatcataaccagattacggcgtttcatggcggcgcaatgatgcgttcgtacgaaaatcacgttcgtgatgtgccgggtgttaccttgggcctcgtaggtcctgatggacgcgagggcatgatccaaaatgccgaagaatttgctgctggtggcattccgttcatttttgacccaggtcaggcactgccgctgttcaacggccccgaactgcgcgagtttatcgaacaggcggactatgtggtggtcaacgattacgaaagcaatcttcttcaaacgcgtactggctggaacgagcaggacattgtttcacgcgtgcaggcgtatatcaccacgcaaggttcggctggagccctggtacatacaccggagaagacctacgatattccgccggctcacacccgtcgtgtcgttgatccaactggttgcggcgacgcgtttcgcgccggcctgatctatggtattcagcataattatgattggttgaccattggccgcatgggaaacttaatgggtgcgctgaaagtggaacaccctggcacccaaaatcagcgtttcgattttgccgaattcaacgaccagttcaaacaatattttggctacgcgctc

SEQ ID NO: 1140 - protein, 321 aa, synthetic construct
  REGION 1..321: note = Variant of adenosine kinase
MHHHHHHGGSGMSALICGSLAYDTIMVFPDQFKNHILPDRVHSLNVSFLVPRMRREFGGCAGNIAYNLHLLGGAPIVMATVGQDFGPYREHFETLGIDLSRVKIIDDLSTPQAFITTDMDHNQITAFHGGAMMRSYENHVRDVPGVTLGLVGPDGREGMIQNAEEFAAGGIPFIFDPGQALPLFNGPELREFIEQADYVVVNDYESNLLQTRTGWNEQDIVSRVQAYITTQGSAGALVHTPEKTYDIPPAHTRRVVDPTGCGDAFRAGLIYGIQHNYDWLTIGRMGNLMGALKVEHPGTQNQRFDFAEFNDQFKQYFGYAL

SEQ ID NO: 1141 - DNA, 963 bp, synthetic construct
  misc_feature 1..963: note = Variant of adenosine kinase
  source 1..963: mol_type = other DNA
atgcaccatcatcaccatcacgggggctccggcatgagtgcactgatttgcggttctttagcgtatgataccatcatggtgtttccggaccagttcaagaaccatattctgcccgatcgtgttcaccgcctcaatgtcagctttcttgtaccacgcatgcgtcgtgaatttggaggctgtgccggcaacattgcgtacaatctgcatctgttgggtggtgctccgatcgtaatggctacggtgggccaagatttcggtccgtatcgcgagcacttcgaaactctgggcattgacttatcccgcgtcaagatcatcgatgatctgagtacaccgcaggccttcattaccaccgacatggatcataaccagattacggcgtttcatggcggcgcaatgatgcgttcgtacgaaaatcacgttcgtgatgtgccgggtgttaccttgggcctcgtaggtcctgatggacgcgagggcatgatccaaaatgccgaagaatttgctgctggtggcattccgttcatttttgacccaggtcaggcactgccgctgttcaacggccccgaactgcgcgagtttatcgaacaggcggactatgtggtggtcaacgattacgaaagcaatcttcttcaaacgcgtactggctggaacgagcaggacattgtttcacgcgtgcaggcgtatatcaccacgcaaggttcggctggagccctggtacatacaccggagaagacctacgatattccgccggctcacacccgtcgtgtcgttgatccaactggttgcggcgacgcgtttcgcgccggcctgatctatggtattcagcataattatgattggttgaccattggccgcatgggaaacttaatgggtgcgctgaaagtggaacaccctggcacgcaaaatcagtggttcgattttgccgaattcaacgaccagttcaaacaatattttggctacgcgctc

SEQ ID NO: 1142 - protein, 321 aa, synthetic construct
  REGION 1..321: note = Variant of adenosine kinase
MHHHHHHGGSGMSALICGSLAYDTIMVFPDQFKNHILPDRVHRLNVSFLVPRMRREFGGCAGNIAYNLHLLGGAPIVMATVGQDFGPYREHFETLGIDLSRVKIIDDLSTPQAFITTDMDHNQITAFHGGAMMRSYENHVRDVPGVTLGLVGPDGREGMIQNAEEFAAGGIPFIFDPGQALPLFNGPELREFIEQADYVVVNDYESNLLQTRTGWNEQDIVSRVQAYITTQGSAGALVHTPEKTYDIPPAHTRRVVDPTGCGDAFRAGLIYGIQHNYDWLTIGRMGNLMGALKVEHPGTQNQWFDFAEFNDQFKQYFGYAL

SEQ ID NO: 1143 - DNA, 969 bp, synthetic construct
  misc_feature 1..969: note = Variant of adenylate kinase
  source 1..969: mol_type = other DNA
atgcaccatcatcaccatcacgggggctccggcatgagtgcactgatttgcggttctttagcgtatgataccatcatggtgtttccggaccagttcaagaaccatattctgcccgataaagttcacatcctcaatgtcagctttcttgtaccacgcatgcgtcgtgaatttggaggctgtgccggcaacattgcgtacaatctgcatctgttgggtggtgctccgatccctatgggaacggtgggccaagatttcggtccgtatcgcgagcacttcgaaactctgggcattgacttatcccgcgtcaagatcatcgatgatctgtttacaccgcaggccttcattaccaccgaccatgataacaaccagattacggcgtttcatccaggcgcaatgatgcgttcgtacgaaaatcacgttcgtgatgtgccgggtgttaccttgggcctcgtaggtcctgatggacgcgagggcatgatccaaaatgccgaagaatttgctgctggtggcattccgttcatttttgacccaggtcaggcaatgccgctgttcaacggccccgaactgcgcgagtttatcgaacaggcggactatgtggtggtcaacgattacgaaagcaatcttcttcaagaacgtactggctggaacgagcaggacattgtttcacgcgtgcaggcgtatatcaccacgcaaggtcctaaaggagccctggtacatacaccggagaagacctacgatattccgccggcacacgaacgtcgtgtcgttgatccaactggttgcggcgacgcgtttcgcgccggcctgatctatggtattcagcataattatgattggttgaccattggccgcatgggaaacttaatgggtgcgctgaaagtggaacaccctggcacgcaaaatcagcgtttcgattttgccgaattcaacgaccagttcaaacaacagtttggctacgcgctctaatga

SEQ ID NO: 1144 - protein, 321 aa, synthetic construct; identical to SEQ ID NO: 2
  REGION 1..321: note = Variant of adenylate kinase

SEQ ID NO: 1145 - DNA, 699 bp, synthetic construct
  misc_feature 1..699: note = Variant of adenylate kinase
  source 1..699: mol_type = other DNA
atgcaccatcatcaccatcacgggggctccggcatgatggcatatctggtgttcttaggtccgccgggcgcgggaaaaggtacccaatcgaaacgcattcaggaaaagactggcatcccacatattagcacgggcgatatcttccgtgacatcgtcaagaaagagaacgatgaactgggcaagaagattaaagaaatcatggagaaaggtgaactcgttccagatgaactggtgaatgaggtagtaaaacgccgcctgtcggagaaagactgcgaaaaaggctttattttggatggttatccgcgtaccgttgctcaagcggaattcctggacagttttcttgaatcccagaacaaacagttgacagccgccgtgctgttcaaagtccccgaagatgttgttgtgcaacgtttaacctctcgcctgatctgtccgaaatgcgggcgtatctacaatatgatttcactgccaccaaaagaagacgagctgtgtgacgattgcaaagtcaaattagtacagcgtgatgatgataaggaagaaacggttcgtcaccgcctgaaagtctaccttgagaagacccagccggtcattgactattatggcaagaaaggtattctcaaacgcgtagatgggtcgcaaggaatcgacaacgttgttgcagaagtcctgaagattattggttggagcgataagtaatga

SEQ ID NO: 1146 - protein, 231 aa, synthetic construct
  REGION 1..231: note = Variant of adenylate kinase
MHHHHHHGGSGMMAYLVFLGPPGAGKGTQSKRIQEKTGIPHISTGDIFRDIVKKENDELGKKIKEIMEKGELVPDELVNEVVKRRLSEKDCEKGFILDGYPRTVAQAEFLDSFLESQNKQLTAAVLFKVPEDVVVQRLTSRLICPKCGRIYNMISLPPKEDELCDDCKVKLVQRDDDKEETVRHRLKVYLEKTQPVIDYYGKKGILKRVDGSQGIDNVVAEVLKIIGWSDK

SEQ ID NO: 1147 - DNA, 699 bp, synthetic construct
  misc_feature 1..699: note = Variant of adenylate kinase
  source 1..699: mol_type = other DNA
atgcaccatcatcaccatcacgggggctccggcatgggggcatatctggtgttcttaggtccgccgggcgcgggaaaaggtacccaaggccgtcgcattcaggaaaagactggcatcccgcatattagcacgggcgatatcttccgtgacatcgtcgctaagcaaaacgatgaactggcctcgaaaattaaagaaatcatggagaaaggtgaactcgttccagatgaactgggtaatgcggtagtaaaacgccgcctgtcggagaaagactgcgaaaaaggctttattttggatggttatccgcgtaccgtggctcaagcggaatatctggatagttttcttgaatcccagaatcgccagttgacagccgccgtgctgttcaaagtccccgaagatgaagttgtgcaacgtttaacctctcgcctgatctgtccgaaatgcgggcgtatctacaacatgatttttctgccaccaaaagaagacgagctgtgtgacgattgcggtgtcggcttagtacagcgtgatgatgataaggaagaaacggtccgtcaccgcctgaaagtctaccttgagaagacccagccggtcattgactattatagtaagaaaggtattctcaaacgcgtagatgggtcgcaaggaatcgacaacgttgttgcagaagtcctggggattctgggttggagcgataagtaatga

SEQ ID NO: 1148 - protein, 231 aa, synthetic construct
  REGION 1..231: note = Variant of adenylate kinase
MHHHHHHGGSGMGAYLVFLGPPGAGKGTQGRRIQEKTGIPHISTGDIFRDIVAKQNDELASKIKEIMEKGELVPDELGNAVVKRRLSEKDCEKGFILDGYPRTVAQAEYLDSFLESQNRQLTAAVLFKVPEDEVVQRLTSRLICPKCGRIYNMIFLPPKEDELCDDCGVGLVQRDDDKEETVRHRLKVYLEKTQPVIDYYSKKGILKRVDGSQGIDNVVAEVLGILGWSDK

SEQ ID NO: 1149 - DNA, 699 bp, synthetic construct
  misc_feature 1..699: note = Variant of adenylate kinase
  source 1..699: mol_type = other DNA
atgcaccatcatcaccatcacgggggctccggcatgggggcatatctggtgttcttaggtccgccgggcgcgggaaaaggtacccaaggccgtcgcatttcggcaaagactggcatcccgcatattagcacgggcgatatcttccgtgacatcgtcgctaagcaaaacgatgaactggcctcgaaaattaaagagatcatggagaaaggtgaactcgttccagatgaactgggtaatgcggtagtaaaacgccgcctgtcggagaaagactgcgaaaaaggctttattttggatggttatccgcgtaccgtgcgccaagcggaatatctggatagttttcttgaaagccagaatcgccagttgacagccgccgtgctgttcaaagtccccgaagatgaagttgtgcaacgtttaacctctcgcctgatctgtccgaaatgcgggcgtatctacaacatgatttttctgccaccaaaagaagacgagctgtgtgacgattgcggtgtcggcttagtacagcgtgatgatgataaggaagaaacggtccgtcaccgcctgaaagtctaccttgagaagacccagccggtcattgactattatagtaagaaaggtattctcaaacgcgtagatgggtcgcaaggaatcgacaacgttgttgcagaagtcctggggattctgggttggagcgataagtaatga

SEQ ID NO: 1150 - protein, 231 aa, synthetic construct
  REGION 1..231: note = Variant of adenylate kinase
MHHHHHHGGSGMGAYLVFLGPPGAGKGTQGRRISAKTGIPHISTGDIFRDIVAKQNDELASKIKEIMEKGELVPDELGNAVVKRRLSEKDCEKGFILDGYPRTVRQAEYLDSFLESQNRQLTAAVLFKVPEDEVVQRLTSRLICPKCGRIYNMIFLPPKEDELCDDCGVGLVQRDDDKEETVRHRLKVYLEKTQPVIDYYSKKGILKRVDGSQGIDNVVAEVLGILGWSDK

SEQ ID NO: 1151 - DNA, 699 bp, synthetic construct
  misc_feature 1..699: note = Variant of adenylate kinase
  source 1..699: mol_type = other DNA
atgcaccatcatcaccatcacgggggctccggcatgggggcatatctggtgttcttaggtccgccgggcgcgggaaaaggtacccaaggccgtcgcatttcggcaaagactggcatcccgcatattagcacgggcgatatcttccgtgacatcgtcgctaagcaaaacgatgaagttgcctcgaaaattaaagagatcatggagaaaggtgaactcgttccagatgaactgggtaatgcggtagtaaaacgccgcctgtcggagaaagactgcgaaaaaggctttattttggatggttatccgcgtaccgtgcgccaagcggaatatctggatagttttcttgaaagccagaatcgccagttgacagccgccgtgctgttcaaagtccccgaagatgaagttgttcagcgtctgctgtctcgcctgatctgtccgaaatgcgggcgtatctacaacatgatttttctgccaccaaaagaagacgagctgtgtgacgattgcggtgtcggcttagtacagcgtgatgatgataaggaagaaacggtccgtcaccgcctgaaagtctaccttgagaagacccagccggtcattgactattatagtaagaaaggtattctcaaacgcgtagatgggtcgcaaggaatcgacaacgttgttgcagaagtcctggggattctgggttggagcgataagtaatga

SEQ ID NO: 1152 - protein, 231 aa, synthetic construct
  REGION 1..231: note = Variant of adenylate kinase
MHHHHHHGGSGMGAYLVFLGPPGAGKGTQGRRISAKTGIPHISTGDIFRDIVAKQNDEVASKIKEIMEKGELVPDELGNAVVKRRLSEKDCEKGFILDGYPRTVRQAEYLDSFLESQNRQLTAAVLFKVPEDEVVQRLLSRLICPKCGRIYNMIFLPPKEDELCDDCGVGLVQRDDDKEETVRHRLKVYLEKTQPVIDYYSKKGILKRVDGSQGIDNVVAEVLGILGWSDK

SEQ ID NO: 1153 - DNA, 699 bp, synthetic construct
  misc_feature 1..699: note = Variant of adenylate kinase
  source 1..699: mol_type = other DNA
atgcaccatcatcaccatcacgggggctccggcatgggggcatatctggtgttcttaggtccgccgggcgcgggaaaaggtacccaaggccgtcgcatttcggcaaagactggcatcccgcatattagcacgggcgatatcctgcgtgacatcgtcgctaagcaaaacgatgaagttgcctcgaaaattaaagagatcatggagaaaggtgaactcgttccagatgaactgggtaatgcggtagtaaaacgccgcctgtcggagaaagactgcgaaaaaggctttattttggatggtttcccgcgtaccgtgcgccaagcggaatatctggatagttttcttgaaagccagaatcgccagttgacagccgccgtgctgttcaaagtccccgaagatgaagttgttcagcgtctgctgtctcgcctgatctgtccgaaatgcgggcgtatctacaacatgatttttctgccaccaaaagaagacgagctgtgtgacgattgcggtgtcggcttagtacagcgtgatgatgataaggaagaaacggtccgtcaccgcctgaaagtctaccttgagaagacccagccggtcattgactattatagtaagaaaggtattctcaaacgcgtagatgggtcgcaaggaatcgacaacgttgtggcagaagtcctggggattctgggttggagcgataagtaatga

SEQ ID NO: 1154 - protein, 231 aa, synthetic construct
  REGION 1..231: note = Variant of adenylate kinase
MHHHHHHGGSGMGAYLVFLGPPGAGKGTQGRRISAKTGIPHISTGDILRDIVAKQNDEVASKIKEIMEKGELVPDELGNAVVKRRLSEKDCEKGFILDGFPRTVRQAEYLDSFLESQNRQLTAAVLFKVPEDEVVQRLLSRLICPKCGRIYNMIFLPPKEDELCDDCGVGLVQRDDDKEETVRHRLKVYLEKTQPVIDYYSKKGILKRVDGSQGIDNVVAEVLGILGWSDK

SEQ ID NO: 1155 - DNA, 699 bp, synthetic construct
  misc_feature 1..699: note = Variant of adenylate kinase
  source 1..699: mol_type = other DNA
atgcaccatcatcaccatcacgggggctccggcatgggggcatatctggtgttcttaggtccgccgggcgcgggaaaaggtacccaaggccgtattatttcggcaaagactggcatcccgcatattagcacgggcgatatcctgcgtgacatcgtcgctaagcaaaacgatgaagttgcctcgaaaattaaagagatcatggagaaaggtgaactcgttccagatgaactgggtaatgcggtagtaaaacgccgcctgtcggagaaagactgcgaaaaaggctttattttggatggtttcccgcgtaccgtgcgccaagcggaatatctggatagttttcttgaaagccagaatcgccagttgacagccgccgtgctgattaaagtccccgaagatgaagttgttcagcgtctgctgtctcgcctgatctgtccgaaatgcgggcgtatctacaacatgatttttctgccaccaaaagaagacgagctgtgtgacgattgcggtgtcggcttagtacagcgtttagatgataaggaagaaacggtccgtcaccgcctgaaagtctaccttgagaagacccagccggtcattgactattatagtaagaaaggtattctcaaacgcgtagatgggtcgcaaggaatcgacaacgttgtggcagaagtcctggggattctgggttggagcgataagtaatga

SEQ ID NO: 1156 - protein, 231 aa, synthetic construct
  REGION 1..231: note = Variant of adenylate kinase
MHHHHHHGGSGMGAYLVFLGPPGAGKGTQGRIISAKTGIPHISTGDILRDIVAKQNDEVASKIKEIMEKGELVPDELGNAVVKRRLSEKDCEKGFILDGFPRTVRQAEYLDSFLESQNRQLTAAVLIKVPEDEVVQRLLSRLICPKCGRIYNMIFLPPKEDELCDDCGVGLVQRLDDKEETVRHRLKVYLEKTQPVIDYYSKKGILKRVDGSQGIDNVVAEVLGILGWSDK

SEQ ID NO: 1157 - DNA, 1257 bp, synthetic construct
  misc_feature 1..1257: note = Variant of acetate kinase
  source 1..1257: mol_type = other DNA
atgcaccatcatcatcatcatggcggtagcggcatgaaagttctggtgattaattctggtagctcctccatcaaatatcagctcctcgatatgaccaacgaaaaggtattagcgaaaggcttggtcgagcgcattggcatcgacggttcgcgtatcgtgcataaagttaacggcgaaaaacacgtgctggaacatgagattaagaatcacgaaattggacttaaattggtcctggatcttcttacggacgaaaaatacggtgtgttgaaggatctcaaagaaatcgatgcagttgggcatcgcgtagtacatggcggcgagcgttttgccagtagcgtgaagattactgacgaagtcttaaagaccatcgagacgttgtcgttcttagctccgttacacaatccagcgaacattatgggtatcaagagcagcatgaaattattaccgggtgtgcctcaagttgccgtctttgatacagcgttccaccagaagatgccggagaaagcctatttgtacgcaatcccctatgagtactacgagaaatataaaattcgccgctatgggtttcatggaacctcacatcgttatgtgagtaaacgtgctgcggaaattatgggcaaaccgtacgatcagctcaagatcattaccgttcacgtgggtaacggcgcatcagttgcggcggtgaagaatggcgtatctgttgacacttccatgggtttcacaccacttgaaggtcttgtcatgggcacgcgcagcggcgatattgatccggccatcgtggaatttcttgagaaagaagaaggattgtcggccaaagaagtcgtcaacatcctcaacaagaaatctggtgtgtatgggctcaccaaaggctttagtagtgacatgcgtgacattgaagataatgctattgaaggtgatcctgtatgccgccttgcattcgatgtgtacgaatatcgtatcgcgaaatatattggcgcatacgctgcggccatgaacggtgttgacgcgatcgtctttaccgcaggagttggcgaaaatagcccgattatgcgcgaagaaattattgagaactacttgggctacttagggatcaagatcgataaagaagccaatgacttcaaaggtgaggagaagatcatttcaacgcccgattccaaagtgattgcgatggtagttccgaccaacgaggagctcatgatcgccaaagacacgaaagaaatcattgagaaagggttggacgagcttaagatctaatga

SEQ ID NO: 1158 - protein, 417 aa, synthetic construct
  REGION 1..417: note = Variant of acetate kinase
MHHHHHHGGSGMKVLVINSGSSSIKYQLLDMTNEKVLAKGLVERIGIDGSRIVHKVNGEKHVLEHEIKNHEIGLKLVLDLLTDEKYGVLKDLKEIDAVGHRVVHGGERFASSVKITDEVLKTIETLSFLAPLHNPANIMGIKSSMKLLPGVPQVAVFDTAFHQKMPEKAYLYAIPYEYYEKYKIRRYGFHGTSHRYVSKRAAEIMGKPYDQLKIITVHVGNGASVAAVKNGVSVDTSMGFTPLEGLVMGTRSGDIDPAIVEFLEKEEGLSAKEVVNILNKKSGVYGLTKGFSSDMRDIEDNAIEGDPVCRLAFDVYEYRIAKYIGAYAAAMNGVDAIVFTAGVGENSPIMREEIIENYLGYLGIKIDKEANDFKGEEKIISTPDSKVIAMVVPTNEELMIAKDTKEIIEKGLDELKI

SEQ ID NO: 1159 - DNA, 1257 bp, synthetic construct
  misc_feature 1..1257: note = Variant of acetate kinase
  source 1..1257: mol_type = other DNA
atgcaccatcatcatcatcatggcggtagcggcatgaaagttctggtgattaattctggtagctcctccatcaaatatcagctcctcgatatgaccaacgaaaaggtattagcgaaaggcttggtcgagcgcattggcatcgacggttcgcgtatcgtgcataaagttaacggcgaaaaacacgtgctggaacatgagattaagaatcacgaaattggacttaaattggtcctggatcttcttacggacgaaaaatacggtgtgttgaaggatctcaaagaaatcgatgcagttgggcatcgcgtagtacatggcggcgagcgttttgccagtagcgtgaagattactgacgaagtcttaaagaccatcgagacgttgtcgttcttagctccgttacacaatccagcgaacattatgggtatcaagagcagcatgaaagtgttaccgggtgtgcctcaagttgccgtctttgatacagcgttccaccagaagatgccggagaaagcctatttgtacgcaatcccctatgagtactacgagaaatataaaattcgccgctatgggtttcatggaacctcacatcgttatgtgagtaaacgtgctgcggaaattatgggcaaaccgtacgatcagctcaagatcattaccgttcacgtgggtaacggcgcatcagttgcggcggtgaagaatggcgtatctgttgacacttccatgggtttcacaccacttgaaggtcttgtcatgggcacgcgcagcggcgatattgatccggccatcgtggaatttcttgagaaagaagaaggattgtcggccaaagaagtcgtcaacatcctcaacaagaaatctggtgtgtatgggctcaccaaaggctttagtagtgacatgcgtgacattgtggataatgctattgaaggtgatcctgtatgccgccttgcattagatgtgtacgaatatcgtatcgcgaaatatattggcgcatacgctgcggccatgaacggtgttgacgcgatcgtctttaccgcaggagttggcgaaaatagcccgattatgcgcgaagaaattattgagaactacttgggctacttagggatcaagatcgataaagaagccaatgacttcaaaggtgaggagaagatcatttcaacgcccgattccaaagtgattgcgatggtagttccgaccaacgaggagctcatgatcgccaaagacacgaaagaaatcattgagaaagggttggacgagcttaagatctaatga

SEQ ID NO: 1160 - protein, 417 aa, synthetic construct
  REGION 1..417: note = Variant of acetate kinase
MHHHHHHGGSGMKVLVINSGSSSIKYQLLDMTNEKVLAKGLVERIGIDGSRIVHKVNGEKHVLEHEIKNHEIGLKLVLDLLTDEKYGVLKDLKEIDAVGHRVVHGGERFASSVKITDEVLKTIETLSFLAPLHNPANIMGIKSSMKVLPGVPQVAVFDTAFHQKMPEKAYLYAIPYEYYEKYKIRRYGFHGTSHRYVSKRAAEIMGKPYDQLKIITVHVGNGASVAAVKNGVSVDTSMGFTPLEGLVMGTRSGDIDPAIVEFLEKEEGLSAKEVVNILNKKSGVYGLTKGFSSDMRDIVDNAIEGDPVCRLALDVYEYRIAKYIGAYAAAMNGVDAIVFTAGVGENSPIMREEIIENYLGYLGIKIDKEANDFKGEEKIISTPDSKVIAMVVPTNEELMIAKDTKEIIEKGLDELKI

SEQ ID NO: 1161 - DNA, 1587 bp, synthetic construct
  misc_feature 1..1587: note = Variant of terminal deoxynucleotidyltransferase
  source 1..1587: mol_type = other DNA
atgcaccatcatcatcatcatggcggtagcggcagccacggcattcgtaccatcgattcggacttcgggaagaaacagcagaaaaaaggcgataaccacgatagttccgccacttatgaaatcaaatttcacgagtttgtgctgttcattctcgaagaaaaaatgggtgcgacgcgtcgtacttttctgacagatttagcccgcaagaaagggttccgcgtcgagaatgaactgaccgacgaagttacccacatcgtggcagaaaatctgtcacgctctgaagtattggcttggctgaaagaacacaagatggagaagaccaagcaattcgaactgctggatattagctggcttatcgaaagcatgaaagttggtaaaccggtggacaccaaggggaaataccagttggcggaatcggttgaggtgagtgcgaacccagatccgacagaaggtcgtgtaaacgagctgcctcctactatgaaaaccgtttctccgtatgcgtgtcaacgccgcaccaccctgaacaaccgtaatcaacgttttacggactcgctggaaattcttcgtgaaaattacgagttcaaacgcaacgatgatactgcgctggaatttcgtcgtgctatctccgtgctgaaaagccttccgtttgaggtacgtagcctgaaagacacggaaggattgccctggatcggtgatgaagtcaaagggattatggaagaaatcatcgaggtcggggagtcgcgtgaagtgcaggccgtgctcaatgatgagtggtatcaaagcttccaccgctttaagagtgtctttggagtgggggtgaagacagcagacaagtggtaccgtatgggtctgcgcaccctcgaggatgttcgttccagcaagaccctgaagttgaccccgatgcagaaagtaggtctgctgtattatgaagatcttgctcgcggcgttacgcgtgccgaagctgacgcgatttggctgctggttcaggatgcagtcgcaactttcgacccggatgcgatcgtggagattgtcggtggatttcgtcgtgggaaacctcagggtcacgacgttgatctgcttatcagttctccgggagctgagaaagagcaagaagaccaactcctgcagaaagtgatgaatctgtggaagaaacaagggttgttgctgtacggtcgtctggaatggacccagtgggaagatgggggttcgccttccggtaaggctgacgagggtgacgcgggtgcgaaatgctttctgatcctcaaactttatgatcatctggtgcgtaaaagcaaatggaacatgccgacgggttcgaacgtgggcgagtccaaaccgtggaaagcaattcgcgtagatctgctgcgttgcccctatggcagttttgcgtttgcgatgttgcagtggaccggaagccgcatgttccgtcgtgatctgcgttggtacgccactgacgagaagaacatgatgctggacaatcattcgctgtatgacctgaccaagggtatcttcctccctgctaaatcggaagaggaaattttcgcacatctggggcttgaatacctggaaccgttcgaacgtaacgca

SEQ ID NO: 1162 - protein, 529 aa, synthetic construct
  REGION 1..529: note = Variant of terminal deoxynucleotidyltransferase
MHHHHHHGGSGSHGIRTIDSDFGKKQQKKGDNHDSSATYEIKFHEFVLFILEEKMGATRRTFLTDLARKKGFRVENELTDEVTHIVAENLSRSEVLAWLKEHKMEKTKQFELLDISWLIESMKVGKPVDTKGKYQLAESVEVSANPDPTEGRVNELPPTMKTVSPYACQRRTTLNNRNQRFTDSLEILRENYEFKRNDDTALEFRRAISVLKSLPFEVRSLKDTEGLPWIGDEVKGIMEEIIEVGESREVQAVLNDEWYQSFHRFKSVFGVGVKTADKWYRMGLRTLEDVRSSKTLKLTPMQKVGLLYYEDLARGVTRAEADAIWLLVQDAVATFDPDAIVEIVGGFRRGKPQGHDVDLLISSPGAEKEQEDQLLQKVMNLWKKQGLLLYGRLEWTQWEDGGSPSGKADEGDAGAKCFLILKLYDHLVRKSKWNMPTGSNVGESKPWKAIRVDLLRCPYGSFAFAMLQWTGSRMFRRDLRWYATDEKNMMLDNHSLYDLTKGIFLPAKSEEEIFAHLGLEYLEPFERNA

SEQ ID NO: 1163 - DNA, 18 bp, synthetic construct
  misc_feature 1..18: note = Modified oligo substrate or product
  modified_base 16: mod_base = OTHER; note = 2'-methoxyguanosine
  modified_base 17: mod_base = OTHER; note = 2'-methoxyadenosine
  modified_base 18: mod_base = OTHER; note = 2'-methoxycytidine
  source 1..18: mol_type = other DNA
tttttttttttttttnnn

SEQ ID NO: 1164 - DNA, 18 bp, synthetic construct
  misc_feature 1..18: note = Modified oligo substrate or product
  modified_base 1: mod_base = OTHER; note = 2'-deoxythymidine with 6-carboxyfluorescein modification
  modified_base 16: mod_base = OTHER; note = 2'-methoxyguanosine
  modified_base 17: mod_base = OTHER; note = 2'-methoxyadenosine
  modified_base 18: mod_base = OTHER; note = 2'-methoxycytidine
  source 1..18: mol_type = other DNA
nttttttttttttttnnn

SEQ ID NO: 1165 - DNA, 19 bp, synthetic construct
  misc_feature 1..19: note = Modified oligo substrate or product
  modified_base 16: mod_base = OTHER; note = 2'-methoxyguanosine
  modified_base 17: mod_base = OTHER; note = 2'-methoxyadenosine
  modified_base 18: mod_base = OTHER; note = 2'-methoxycytidine
  modified_base 19: mod_base = OTHER; note = guanosine ribonucleotide
  source 1..19: mol_type = other DNA
tttttttttttttttnnnn

SEQ ID NO: 1166 - DNA, 19 bp, synthetic construct
  misc_feature 1..19: note = Modified oligo substrate or product
  modified_base 1: mod_base = OTHER; note = 2'-deoxythymidine with 6-carboxyfluorescein modification
  modified_base 16: mod_base = OTHER; note = 2'-methoxyguanosine
  modified_base 17: mod_base = OTHER; note = 2'-methoxyadenosine
  modified_base 18: mod_base = OTHER; note = 2'-methoxycytidine
  modified_base 19: mod_base = OTHER; note = guanosine ribonucleotide
  source 1..19: mol_type = other DNA
nttttttttttttttnnnn

SEQ ID NO: 1167 - DNA, 19 bp, synthetic construct
  misc_feature 1..19: note = Modified oligo substrate or product
  modified_base 16: mod_base = OTHER; note = 2'-methoxyguanosine
  modified_base 17: mod_base = OTHER; note = 2'-methoxyadenosine
  modified_base 18: mod_base = OTHER; note = 2'-methoxycytidine
  modified_base 19: mod_base = OTHER; note = 2'-fluoro adenosine
  source 1..19: mol_type = other DNA
tttttttttttttttnnnn

SEQ ID NO: 1168 - DNA, 19 bp, synthetic construct
  misc_feature 1..19: note = Modified oligo substrate or product
  modified_base 1: mod_base = OTHER; note = 2'-deoxythymidine with 6-carboxyfluorescein modification
  modified_base 16: mod_base = OTHER; note = 2'-methoxyguanosine
  modified_base 17: mod_base = OTHER; note = 2'-methoxyadenosine
  modified_base 18: mod_base = OTHER; note = 2'-methoxycytidine
  modified_base 19: mod_base = OTHER; note = 2'-fluoro adenosine
  source 1..19: mol_type = other DNA
nttttttttttttttnnnn

SEQ ID NO: 1169 - DNA, 19 bp, synthetic construct
  misc_feature 1..19: note = Modified oligo substrate or product
  modified_base 16: mod_base = OTHER; note = 2'-methoxyguanosine
  modified_base 17: mod_base = OTHER; note = 2'-methoxyadenosine
  modified_base 18: mod_base = OTHER; note = 2'-methoxycytidine
  modified_base 19: mod_base = OTHER; note = 2'-fluoro guanosine
  source 1..19: mol_type = other DNA
tttttttttttttttnnnn

SEQ ID NO: 1170 - DNA, 19 bp, synthetic construct
  misc_feature 1..19: note = Modified oligo substrate or product
  modified_base 1: mod_base = OTHER; note = 2'-deoxythymidine with 6-carboxyfluorescein modification
  modified_base 16: mod_base = OTHER; note = 2'-methoxyguanosine
  modified_base 17: mod_base = OTHER; note = 2'-methoxyadenosine
  modified_base 18: mod_base = OTHER; note = 2'-methoxycytidine
  modified_base 19: mod_base = OTHER; note = 2'-fluoro guanosine
  source 1..19: mol_type = other DNA
nttttttttttttttnnnn

SEQ ID NO: 1171 - DNA, 19 bp, synthetic construct
  misc_feature 1..19: note = Modified oligo substrate or product
  modified_base 16: mod_base = OTHER; note = 2'-methoxyguanosine
  modified_base 17: mod_base = OTHER; note = 2'-methoxyadenosine
  modified_base 18: mod_base = OTHER; note = 2'-methoxycytidine
  modified_base 19: mod_base = OTHER; note = 2'-methoxyadenosine
  source 1..19: mol_type = other DNA
tttttttttttttttnnnn

SEQ ID NO: 1172 - DNA, 19 bp, synthetic construct
  misc_feature 1..19: note = Modified oligo substrate or product
  modified_base 1: mod_base = OTHER; note = 2'-deoxythymidine with 6-carboxyfluorescein modification
  modified_base 16: mod_base = OTHER; note = 2'-methoxyguanosine
  modified_base 17: mod_base = OTHER; note = 2'-methoxyadenosine
  modified_base 18: mod_base = OTHER; note = 2'-methoxycytidine
  modified_base 19: mod_base = OTHER; note = 2'-methoxyadenosine
  source 1..19: mol_type = other DNA
nttttttttttttttnnnn

SEQ ID NO: 1173 - DNA, 693 bp, synthetic construct
  misc_feature 1..693: note = variant of adenylate kinase from Thermotoga neapolitana
  source 1..693: mol_type = other DNA
atgcaccatcatcaccatcacgggggctccggcatgggggcatatctggtgttcttaggtccgccgggcgcgggaaaaggtacccaaggccgtattatttcggcaaagactggcatcccgcatattagcacgggcgatatcctgcgtgacatcgtcgctaagcaaaacgatgaagttgcctcgagcattaaagagatcatggagaaaggtgaactcgttccagatgaactgggtaatgcggtagtaaaacgccgcctgtcggagaaagactgcgaaaaaggctttattttggatggtttcccgcgtaccgtgcgccaagcggaatatctggatagttttcttgaaagccagaatcgccagttgacagccgccgtgctgattgaggtccccgaagatgaagttgttcagcgtctgctgtctcgcctgatctgtccgaaatgcgggcgtatctacaacatgatttttctgccaccaaaagaagacgagctgtgtgacgattgcggtgtcggcttagtacagcgtttagatgataaggaagaaacggtccgtcaccgcctgaaagtctaccgtgagaagacccagccggtcattgactattatagtaagaaaggtattctcaaacgcgtagatgggtcgcaaggaatcgacaacgttgtggcagaagtcctggggattctgggttggagcgataag

SEQ ID NO: 1174 - protein, 231 aa, synthetic construct
  REGION 1..231: note = variant of adenylate kinase from Thermotoga neapolitana
MHHHHHHGGSGMGAYLVFLGPPGAGKGTQGRIISAKTGIPHISTGDILRDIVAKQNDEVASSIKEIMEKGELVPDELGNAVVKRRLSEKDCEKGFILDGFPRTVRQAEYLDSFLESQNRQLTAAVLIEVPEDEVVQRLLSRLICPKCGRIYNMIFLPPKEDELCDDCGVGLVQRLDDKEETVRHRLKVYREKTQPVIDYYSKKGILKRVDGSQGIDNVVAEVLGILGWSDK

SEQ ID NO: 1175 - DNA, 693 bp, synthetic construct
  misc_feature 1..693: note = variant of adenylate kinase from Thermotoga neapolitana
  source 1..693: mol_type = other DNA
atgcaccatcatcaccatcacgggggctccggcatgggggcatatctggtgttcttaggtccgccgggcgcgggaaaaggtacccaaggccgtattatttcggcaaagactggcatcccgcatattagcacgggcgatatcctgcgtgacatcgtcgctaagcaaaacgatgaagttgcctcgagcattaaagagatcatggagaaaggtgaactcgttccagatgaactgggtaatgcggtagtaaaacgccgcctgtcggagaaagactgcgaaaaaggctttattttggatggtttcccgcgtaccgtgcgccaagcggaatatctggatagttttcttgaaagccagaatcgccagttgacagccgccgtgctgattgaggtccccgaagatgaagttgttgcacgtctgctgtctcgcctgatctgtccgaaatgcgggcgtagttacaacatgatttttctgccaccaaaagaagacgagctgtgtgacgattgcggtgtcggcttagtacagcgtttagatgataaggaagaaacggtccgtcaccgcctgaaagtctaccgtgagaagacccagccggtcattgactattatagtaagaaaggtattctcaaacgcgtagatgggtcgcaaggaatcgaccctgtggtggcagaagtcctggggattctgggttggagcgataag

SEQ ID NO: 1176 - protein, 231 aa, synthetic construct
  REGION 1..231: note = variant of adenylate kinase from Thermotoga neapolitana
MHHHHHHGGSGMGAYLVFLGPPGAGKGTQGRIISAKTGIPHISTGDILRDIVAKQNDEVASSIKEIMEKGELVPDELGNAVVKRRLSEKDCEKGFILDGFPRTVRQAEYLDSFLESQNRQLTAAVLIEVPEDEVVARLLSRLICPKCGRSYNMIFLPPKEDELCDDCGVGLVQRLDDKEETVRHRLKVYREKTQPVIDYYSKKGILKRVDGSQGIDPVVAEVLGILGWSDK

SEQ ID NO: 1177 - DNA, 693 bp, synthetic construct
  misc_feature 1..693: note = variant of adenylate kinase from Thermotoga neapolitana
  source 1..693: mol_type = other DNA
atgcaccatcatcaccatcacgggggctccggcatgggggcatatctggtgttcttaggtccgccgggcgcgggaaaaggtacccaaggccgtattatttcggcaaagactggcatcccgcatattagcacgggcgatatcctgcgtgacatcgtcgctaagcaaaacgatgaagttgcctcgagcattaaagagatcatgctgaaaggtgaactcgttccagatgaactgggtaatgcggtagtaaaacgccgcctgtcggagaaagactgcgaaaaaggctttattttggatggtttcccgcgtaccgtgcgccaagcggaatatctggatagttttcttgaaagccagaatcgccagttgacagccgccgtgctgattgaggtccccgaagatgaagttgttgcacgtctgctgtctcgccgtatctgtccgaaatgcgggcgtagttacaacatgatttttctgccaccaaaagaagacgagctgtgtgacgattgcggtgtcggcttagtacagcgtttagatgataaggaagaaacggtccgtcaccgcctgaaagtctaccgtgagaagacccagccggtcattgactattatagtaagaaaggtattctcgcacgcgtagatgggtcgcaaggaatcccacctatcgtggcagaagtcctggggattctgggttggagcgataag

SEQ ID NO: 1178 - protein, 231 aa, synthetic construct
  REGION 1..231: note = variant of adenylate kinase from Thermotoga neapolitana
MHHHHHHGGSGMGAYLVFLGPPGAGKGTQGRIISAKTGIPHISTGDILRDIVAKQNDEVASSIKEIMLKGELVPDELGNAVVKRRLSEKDCEKGFILDGFPRTVRQAEYLDSFLESQNRQLTAAVLIEVPEDEVVARLLSRRICPKCGRSYNMIFLPPKEDELCDDCGVGLVQRLDDKEETVRHRLKVYREKTQPVIDYYSKKGILARVDGSQGIPPIVAEVLGILGWSDK

SEQ ID NO: 1179 - DNA, 693 bp, synthetic construct
  misc_feature 1..693: note = variant of adenylate kinase from Thermotoga neapolitana
  source 1..693: mol_type = other DNA
atgcaccatcatcaccatcacgggggctccggcatgggggcatatctggtgttattaggtccgccgggcgcgggaaaaggtacccaaggccgtattatttcggcaaagactggcatcccgcatattagcacgggcgatatcctgcgtgacatcgtcgctaagcaaaacgatgaagttgcctcgagcattaaagagatcatgctgaaaggtgaactcgttccagatgaactgggtaatgcggtagtaaaacgccgcctgtcggagaaagactgcgaaaaaggctttattttggatggtttcccgcgtaccgtgcgccaagcggaatatctggatagttttcttgaaagccagggccgccagttgacagccgccgtgctgattgaggtccccgaagatgaagttgttgcacgtctgctgtctcgccgtatctgtccgaaatgcgggcgtagttacaacatgatttttctgccaccaaaagaagacgagctgtgtgacgattgcggtgtcagcttagtacagcgtttagatgataaggaagaaacggtccgtcaccgcctgaaagtctaccgtgagaagacccagccggtcattgactattatagtaagaaaggtattctcgcacgcgtagatgggtcgcaaggaatcccacctatcgtggcagaagtcctggggattctgggttggagcgataag

SEQ ID NO: 1180 - protein, 231 aa, synthetic construct
  REGION 1..231: note = variant of adenylate kinase from Thermotoga neapolitana
MHHHHHHGGSGMGAYLVLLGPPGAGKGTQGRIISAKTGIPHISTGDILRDIVAKQNDEVASSIKEIMLKGELVPDELGNAVVKRRLSEKDCEKGFILDGFPRTVRQAEYLDSFLESQGRQLTAAVLIEVPEDEVVARLLSRRICPKCGRSYNMIFLPPKEDELCDDCGVSLVQRLDDKEETVRHRLKVYREKTQPVIDYYSKKGILARVDGSQGIPPIVAEVLGILGWSDK

SEQ ID NO: 1181 - DNA, 693 bp, synthetic construct
  misc_feature 1..693: note = variant of adenylate kinase from Thermotoga neapolitana
  source 1..693: mol_type = other DNA
atgcaccatcatcaccatcacgggggctccggcatgggggcatatctggtgttattaggtccgccgggcgcgggaaaaggtacccaaggccgtattatttcggcaaagactggcatcccgcatattagcacgggcgatatcctgcgtgacatcgtcgctaagcaaaacgatgaagttgcctcgagcattaaagagtggatgctgaaaggtgaactcgttccagatgaactgggtaatgcggtagtaaaacgccgcctgtcggagaaagactgcgaaaaaggctttattttggatggtttcccgcgtaccgtgcgccaagcggaatatctggatagttttcttgaaagccagggccgccagttgacagccgccgtgctgattgaggtccccgaagatgaagttgttgcacgtctgctgtctcgccgtatctgtccgaaatgcgggcgtagttacaacatgatttttctgccaccaaaagaagacgagctgtgtgacgattgcggtgtcagcttagtacagcgtttagatgataaggaagaaacggtccgtcaccgcctgaaagtctaccgtgagaagacccagccggtcattgactattatagtaagaaaggtattctcgcacgcgtagatgggtcgcaaggaatcccacctatcgtggcagaagtcctggggattctgggttggagcgataag

SEQ ID NO: 1182 - protein, 231 aa, synthetic construct
  REGION 1..231: note = variant of adenylate kinase from Thermotoga neapolitana
MHHHHHHGGSGMGAYLVLLGPPGAGKGTQGRIISAKTGIPHISTGDILRDIVAKQNDEVASSIKEWMLKGELVPDELGNAVVKRRLSEKDCEKGFILDGFPRTVRQAEYLDSFLESQGRQLTAAVLIEVPEDEVVARLLSRRICPKCGRSYNMIFLPPKEDELCDDCGVSLVQRLDDKEETVRHRLKVYREKTQPVIDYYSKKGILARVDGSQGIPPIVAEVLGILGWSDK

SEQ ID NO: 1183 - DNA, 693 bp, synthetic construct
  misc_feature 1..693: note = variant of adenylate kinase from Thermotoga neapolitana
  source 1..693: mol_type = other DNA
atgcaccatcatcaccatcacgggggctccggcatgggggcatatctggtgttattaggtccgccgggcgcgggaaaaggtacccaaggccgtattatttcggcaaagactggcatcccgcatattagcacgggcgatatcctgcgtgacatcgtcgctaagcaaaacgatgaagttgcctcgagcattaaagagtggatgctgaaaggtgaactcgttccagatgaactgggtaatgcggtagtaaaacgccgcctgaaggagaaagactgcgaaaaaggctttattttggatggtttcccgcgtaccgtgcgccaagcggaatatctggatagttttcttgaaagccagggccgccagttgacagccgccgtgctgattgaggtccccgaagatgaagttgttgcacgtctgctgtctcgccgtatctgtccgaaatgcgggcgtagttacaacatgatttttctgccaccaaaagaagacgagctgtgtgacgattgcggtgtcagcttagtacagcgtttagatgataaggaagaaacggtccgtcaccgcctgaaagtctaccgtgagaagacccagccggtcattgactattatagtaagaaaggtattctcgcacgcgtagatgggtcgcaaggaatcccacctatcgtggcagaagtcctggggattctgggttggagcgataag

SEQ ID NO: 1184 - protein, 231 aa, synthetic construct
  REGION 1..231: note = variant of adenylate kinase from Thermotoga neapolitana
MHHHHHHGGSGMGAYLVLLGPPGAGKGTQGRIISAKTGIPHISTGDILRDIVAKQNDEVASSIKEWMLKGELVPDELGNAVVKRRLKEKDCEKGFILDGFPRTVRQAEYLDSFLESQGRQLTAAVLIEVPEDEVVARLLSRRICPKCGRSYNMIFLPPKEDELCDDCGVSLVQRLDDKEETVRHRLKVYREKTQPVIDYYSKKGILARVDGSQGIPPIVAEVLGILGWSDK

SEQ ID NO: 1185 - DNA, 693 bp, synthetic construct
  misc_feature 1..693: note = variant of adenylate kinase from Thermotoga neapolitana
  source 1..693: mol_type = other DNA
atgcaccatcatcaccatcacgggggctccggcatgggggcatatctggtgttattaggtccgccgggcgcgggaaaaggtacccaaggccgtattatttcggcaaagactggcatcccgcatattagcacgggcgatatcctgcgtgacatcgtcgctaagcaaaacgatgaagttgcctcgagcattaaagagtggatgctgaaaggtgaactcgttccagatgaaattggtaatgcggtagtaaaacgccgcctgaaggagaaagactgcgaaaaaggctttattttggatggtttcccgcgtaccgtgcgccaagcggaatatctggatagttttcttgaaagccagggccgccagttgacagccgccgtgctgattgaggtccccgaagatgaagttgttgcacgtctgctgtctcgccgtgtttgtccgaaatgcgggcgtagttacaacatgatttttctgccaccaaaagaagacgagctgtgtgacgattgcggtgtcagcttagtacagcgtttagatgataaggaagaaacggtccgtcaccgcctgaaagtctaccgtgagaagacccagccggtcattgactattatagtaagaaaggtattctcgcacgcgtagatgggagccaagaaatccggcctatcgtggcagaagtcctggggattctgggttggagcgataag

SEQ ID NO: 1186 - protein, 231 aa, synthetic construct
  REGION 1..231: note = variant of adenylate kinase from Thermotoga neapolitana
MHHHHHHGGSGMGAYLVLLGPPGAGKGTQGRIISAKTGIPHISTGDILRDIVAKQNDEVASSIKEWMLKGELVPDEIGNAVVKRRLKEKDCEKGFILDGFPRTVRQAEYLDSFLESQGRQLTAAVLIEVPEDEVVARLLSRRVCPKCGRSYNMIFLPPKEDELCDDCGVSLVQRLDDKEETVRHRLKVYREKTQPVIDYYSKKGILARVDGSQEIRPIVAEVLGILGWSDK

SEQ ID NO: 1187 - DNA, 693 bp, synthetic construct
  misc_feature 1..693: note = variant of adenylate kinase from Thermotoga neapolitana
  source 1..693: mol_type = other DNA
atgcaccatcatcaccatcacgggggctccggcatgggggcatatctggtgttattaggtccgccgggcgcgggaaaaggtacccaaggccgtattatttcggcaaagactggcatcccgcatattagcacgggcgatatcctgcgtgacatcgtcgctaagcaaaacgatgaagttgcctcgagcattaaagagtggatgctgaaaggtgaactcgttccagatgaaattggtaatcctgtagtaaaacgccgcctgaaggagaaagactgcgaaaaaggctttattttggatggtttcccgcgtaccgtgcgccaagcggaatatctggatagttttcttgaaagccagggccgccagttgacagccgccgtgctgattgaggtccccgaagatgaagttgttgcacgtctgctgtctcgccgtgtttgtccgaaatgcgggcgtagttacaacatgatttttctgccaccaaaagaagacgagctgtgtgacgattgcggtgtcagcttagtacagcgtttagatgataaggaagaaacggtccgtcaccgcctgaaagtctaccgtgagaagacccagccggtcattgactattatagtaagaaaggtattctcgcacgcgtagatgggagccaagaaatccggcctatcgtggcagaagtcctggggattctgggttggagcgataag

SEQ ID NO: 1188 - protein, 231 aa, synthetic construct
  REGION 1..231: note = variant of adenylate kinase from Thermotoga neapolitana
MHHHHHHGGSGMGAYLVLLGPPGAGKGTQGRIISAKTGIPHISTGDILRDIVAKQNDEVASSIKEWMLKGELVPDEIGNPVVKRRLKEKDCEKGFILDGFPRTVRQAEYLDSFLESQGRQLTAAVLIEVPEDEVVARLLSRRVCPKCGRSYNMIFLPPKEDELCDDCGVSLVQRLDDKEETVRHRLKVYREKTQPVIDYYSKKGILARVDGSQEIRPIVAEVLGILGWSDK

SEQ ID NO: 1189 - DNA, 1251 bp, synthetic construct
  misc_feature 1..1251: note = variant of acetate kinase from Marinitoga sp. 38H-ov
  source 1..1251: mol_type = other DNA
atgcaccatcatcatcatcatggcggtagcggcatgaaagttctggtgattaattctggtagctcctccatcaaatatcagctcctcgatatgaccaacgaaaaggtattagcgaaaggcttggtcgagcgcattggcatcgacggttcgcgtatcgtgcataaagttaacggcgaagggcacgtgctggaacatgagattaaaaatcacgaaattggacttaaattggtcctggatcttcttacggacgaaaaatacggtgtgttgaaggatctcaaagaaatcgatgcagttgggcatcgcgtagtacatggcggcgagcgttttgccagtagcgtgaagattactgacgaagtcttaaagaccatcgagacgttgtcgttcttagctccgttacacaatccagcgaacattatgggtatcaagagcagcatgaaagtgttaccgggtgtgcctcaagttgccgtctttgatacagcgttccaccagaagatgccggagaaagcctatttgtacgcaatcccctatgagtactacgagaaatataaaattcgccgctatgggtttcatggaacctcacatcgttatgtgagtaaacgtgctgcggaaattatgggcaaaccgtacgatcagctcaagatcattaccgttcacgtgggtaacggcgcatcagttgcggcggtgaagaatggcgtatctgttgacacttccatgggtttcacaccacttgaaggtcttgtcatgggcacgcgcagcggcgatattgatccggccatcgtggaatttcttgagaaagaagaaggattgtcggccaaagaagtcgtcaacatcctcaacaagaaatctggtgtgtatgggctcaccaaaggctttagtagtgacatgcgtgacattgtgctgaaggctattgaaggtgatcctgtatgccgccttgcattagatgtgtattattatcgtatcgcgaaatatattggcgcatacgctgcggccatgaacggtgttgacgcgatcgtctttaccgcaggagttggcgaaaatagcccgattatgcgcgaagaaattattgagaactacttgggctacttagggatcaagatcgataaagaagccaatgacttcaaaggtgaggagaagatcatttcaacgcccgattccaaagtgattgcgatggtagttccgaccaacgaggagctcatgatcgccaaagacacgaaagaaatcattgagaaagggttggacgagcttaagatc

SEQ ID NO: 1190 - protein, 417 aa, synthetic construct
  REGION 1..417: note = variant of acetate kinase from Marinitoga sp. 38H-ov
MHHHHHHGGSGMKVLVINSGSSSIKYQLLDMTNEKVLAKGLVERIGIDGSRIVHKVNGEGHVLEHEIKNHEIGLKLVLDLLTDEKYGVLKDLKEIDAVGHRVVHGGERFASSVKITDEVLKTIETLSFLAPLHNPANIMGIKSSMKVLPGVPQVAVFDTAFHQKMPEKAYLYAIPYEYYEKYKIRRYGFHGTSHRYVSKRAAEIMGKPYDQLKIITVHVGNGASVAAVKNGVSVDTSMGFTPLEGLVMGTRSGDIDPAIVEFLEKEEGLSAKEVVNILNKKSGVYGLTKGFSSDMRDIVLKAIEGDPVCRLALDVYYYRIAKYIGAYAAAMNGVDAIVFTAGVGENSPIMREEIIENYLGYLGIKIDKEANDFKGEEKIISTPDSKVIAMVVPTNEELMIAKDTKEIIEKGLDELKI

SEQ ID NO: 1191 - DNA, 963 bp, synthetic construct
  misc_feature 1..963: note = variant of adenosine kinase from Xanthemonas campestris
  source 1..963: mol_type = other DNA
atgcaccatcatcaccatcacgggggctccggcatgagtgcactgatttgcggttctttagcgtatgataccatcatggtgtttccggaccagttcaagaaccatattctgcccgatcgtgttcaccgcctcaatgtcagctttcttgtaccacgcatgcgtcgtgggtttggaggctgtgccggcaacattgcgtacaatctgcatctgttgggtggtgctccgatcgtaatggctacggtgggccaagatttcggtccgtatcgcgagcacttcgaaactctgggcattgacttatcccgcgtcaagatcatcgatgatctgagtacaccgcaggccttcattaccaccgacatggatctgaaccagattacggcgtttcatggcggcgcaatgatgcgttcgtacgaaaatcacgttcgtgatgtgccgggtgttaccttgggcctcgtaggtcctgatggacgcgagggcatgatccaaaatgccgaagaatttgctgctggtggcattccgttcatttttgacccaggtcaggcactgccgctgttcaacggccccgaactgcgcgagtttatcgaacaggcggactatgtggtggtcaacgattacgaaagcaatcttcttcaaacgcgtactggctggaacgagcaggacattgtttcacgcgtgcaggcgtatatcgttacgcaaggttcggctggagccctggtacatacaccggagaagacctacgatattccgccggctcacacccgtcgtgtcgttgatccaactggttgcggcgacgcgtttcgcgccggcctgatctatggtattcagcataattatgattggttgaccattggccgcatgggaaacttaatgggtgcgctgaaagtggaacaccctggcacccaaaatcagcgtttcgattttgccgaattcaacgaccagttcaaacaatattttggctacgcgctc

SEQ ID NO: 1192 - protein, 321 aa, synthetic construct
  REGION 1..321: note = variant of adenosine kinase from Xanthemonas campestris
MHHHHHHGGSGMSALICGSLAYDTIMVFPDQFKNHILPDRVHRLNVSFLVPRMRRGFGGCAGNIAYNLHLLGGAPIVMATVGQDFGPYREHFETLGIDLSRVKIIDDLSTPQAFITTDMDLNQITAFHGGAMMRSYENHVRDVPGVTLGLVGPDGREGMIQNAEEFAAGGIPFIFDPGQALPLFNGPELREFIEQADYVVVNDYESNLLQTRTGWNEQDIVSRVQAYIVTQGSAGALVHTPEKTYDIPPAHTRRVVDPTGCGDAFRAGLIYGIQHNYDWLTIGRMGNLMGALKVEHPGTQNQRFDFAEFNDQFKQYFGYAL

SEQ ID NO: 1193 - DNA, 963 bp, synthetic construct
  misc_feature 1..963: note = variant of adenosine kinase from Xanthemonas campestris
  source 1..963: mol_type = other DNA
atgcaccatcatcaccatcacgggggctccggcatgagtgcactgatttgcggttctttagcgtatgataccatcatggtgtttccggacctgttcaagaaccatattctgcccgatcgtgttcaccgcctcaatgtcagctttcttgtaccacgcatgcgtcgtgaatttggaggctgtgccggcaacattgcgtacaatctgcatctgttgggtggtgctccgatcgtaatggctacggtgggccaagatttcggtccgtatcgcgagcacttcgaaactctgggcattgacttatcccgcgtcaagatcatcgatgatctgagtacaccgcaggcgttcattaccaccgacatggatcataaccagattacggcgtttcacggcggcgcaatgatgcgttcgtacgaaaatcacgttcgtgatgtgccgggtgttaccttgggcctcgtaggtcctgatggacgcgagggcatgatccaaaatgccgaagaatttgctgctggtggcattccgttcatttttgacccaggtcaggcactgccgctgttcaacggccccgaactgcgcgagtttatcgaacaggcggactatgtggtggtcaacgattacgaaagcaatcttcttcaagcccgtactggctggaacgagcaggacattgtttcacgcgtgcaggcgtatatcaccacgcaaggttcggctggagccctggtacatacaccggagaagacctacgatattccgccggctcacacccgtcgtgtcgttgatccaactggttgcggcgacgcgtttcgcgccggcctgatctatggtattcagcataattatgattggttgaccattggccgcatgggaaacttaatgggtgcgctgaaagtggaacaccctggcacccaaaatcagcgtttcgattttgccgaattcaacgaccagttcaaacaatattttggctacgcgctc

SEQ ID NO: 1194 - protein, 321 aa, synthetic construct
  REGION 1..321: note = variant of adenosine kinase from Xanthemonas campestris
MHHHHHHGGSGMSALICGSLAYDTIMVFPDLFKNHILPDRVHRLNVSFLVPRMRREFGGCAGNIAYNLHLLGGAPIVMATVGQDFGPYREHFETLGIDLSRVKIIDDLSTPQAFITTDMDHNQITAFHGGAMMRSYENHVRDVPGVTLGLVGPDGREGMIQNAEEFAAGGIPFIFDPGQALPLFNGPELREFIEQADYVVVNDYESNLLQARTGWNEQDIVSRVQAYITTQGSAGALVHTPEKTYDIPPAHTRRVVDPTGCGDAFRAGLIYGIQHNYDWLTIGRMGNLMGALKVEHPGTQNQRFDFAEFNDQFKQYFGYAL

SEQ ID NO: 1195 - DNA, 963 bp, synthetic construct
  misc_feature 1..963: note = variant of adenosine kinase from Xanthemonas campestris
  source 1..963: mol_type = other DNA
atgcaccatcatcaccatcacgggggctccggcatgagtgcactgatttgcggttctttagcgtatgataccatcatggtgtttccggaccagttcaagaaccatattctgcccgatcgtgttcaccgcctcaatgtcagctttcttgtaccggacatgcgtcgtgaatttggaggctgtgccggcaacattgcgtacaatctgcatctgttgggtggtgctccgatcgtaatggctacggtgggccaagatttcggtccgtatcgcgagcacttcgaaactctgggcattgacttatcccgcgtcaagatcatcgatgatctgagtacaccgcaggccttcattaccaccgacatggatcataaccagattacggcgtttcacggcggcgcaatgatgcgttcgtacgaaaatcacgttcgtgatgtgccgggtgttaccttgggcctcgtaggtcctgatggacgcgagggcatgatccaaaatgccgaagaatttgctgctatgggcattccgttcatttttgacccaggtcaggcagtgccgctgttcaacggccccgaactgcgcgagtttatcgaacaggcggactatgtggtggtcaacgattacgaaagcaatcttcttcaagcccgtactggctggaacgagcaggacattgtttcacgcgtgcaggcgtatatcaccacgcaaggttcggctggagccctggtacatacaccggagaagacctacgatattccgccggctaaaacccgtcgtgtcgttgatccaactggttgcggcgacgcgtttcgcgccggcctgatctatggtattcagcataattatgattggttgaccattggccgcatgggaaacttaatgggtgcgctgaaagtggaacaccctggcacccaaaatcagcgtttcgattttgccgaattcaacgaccagttcaaacaatattttggctacgcgctc

SEQ ID NO: 1196 - protein, 321 aa, synthetic construct
  REGION 1..321: note = variant of adenosine kinase from Xanthemonas campestris
MHHHHHHGGSGMSALICGSLAYDTIMVFPDQFKNHILPDRVHRLNVSFLVPDMRREFGGCAGNIAYNLHLLGGAPIVMATVGQDFGPYREHFETLGIDLSRVKIIDDLSTPQAFITTDMDHNQITAFHGGAMMRSYENHVRDVPGVTLGLVGPDGREGMIQNAEEFAAMGIPFIFDPGQAVPLFNGPELREFIEQADYVVVNDYESNLLQARTGWNEQDIVSRVQAYITTQGSAGALVHTPEKTYDIPPAKTRRVVDPTGCGDAFRAGLIYGIQHNYDWLTIGRMGNLMGALKVEHPGTQNQRFDFAEFNDQFKQYFGYAL

SEQ ID NO: 1197 - DNA, 963 bp, synthetic construct
  misc_feature 1..963: note = variant of adenosine kinase from Xanthemonas campestris
  source 1..963: mol_type = other DNA
atgcaccatcatcaccatcacgggggctccggcatgagtgcactgatttgcggttctttagcgtatgataccatcatggtgtttccggaccagttcaagaaccatattctgcccgatcgtgttcaccgcctcaatgtcagctttcttgtaccggacatgcgtcgtgaatttggaggctgtgccggcaacattgcgtacaatctgcatctgttgggtggtgctccgatcgtaatggctacggtgggccaagatttcggtccgtatcgcgagcacttcgaaactctgggcattgacttatcccgcgtcaagatcatcgatgatctgagtacaccgcaggccttcattaccaccgacatggatcataaccagattacggcgtttcacggcggcgcaatgatgcgttcgtacgaaaatcacgttagcgatgtgccgggtgttaccttgggcctcgtaggtcctgatggacgcgagggcatgatccaaaatgccgaagaatttgctgctatgggcattccgttcatttttgacccaggtcaggcagtgccgctgttcaacggcccagaactgcgcgagtttatcgaacaggcggactatgtggtggtcaacgattacgaaagcaatcttcttcaagcccgtactggctggaacgagcaggacattgtttcacgcgtgcaggcgtatatcaccacgcaaggttcggctggagccctggtacatacaccggagaagacctacgatattccgccggctaaaacccgtcgtgtcgttgatccaactggttgcggcgacgcgtttcgcgccggcctgatctatggtattcagcataattatgattggttgaccattggccgcatgggaaacttaatgggtgcgctgaaagtggaacaccctggcacccaaaatcagcgtttcgattttgccgaattcaacgaccagttcaaacaatattttggctacgcgctc

SEQ ID NO: 1198 - protein, 321 aa, synthetic construct
  REGION 1..321: note = variant of adenosine kinase from Xanthemonas campestris
MHHHHHHGGSGMSALICGSLAYDTIMVFPDQFKNHILPDRVHRLNVSFLVPDMRREFGGCAGNIAYNLHLLGGAPIVMATVGQDFGPYREHFETLGIDLSRVKIIDDLSTPQAFITTDMDHNQITAFHGGAMMRSYENHVSDVPGVTLGLVGPDGREGMIQNAEEFAAMGIPFIFDPGQAVPLFNGPELREFIEQADYVVVNDYESNLLQARTGWNEQDIVSRVQAYITTQGSAGALVHTPEKTYDIPPAKTRRVVDPTGCGDAFRAGLIYGIQHNYDWLTIGRMGNLMGALKVEHPGTQNQRFDFAEFNDQFKQYFGYAL

SEQ ID NO: 1199 - DNA, 963 bp, synthetic construct
  misc_feature 1..963: note = variant of adenosine kinase from Xanthemonas campestris
  source 1..963: mol_type = other DNA
atgcaccatcatcaccatcacgggggctccggcatgagtgcactgatttgcggttctttagcgtatgataccatcatggtgtttccggaccagttcaagaaccatattctgcccgatcgtgttcaccgcctcaatgtcagctttcttgtaccgggcatgcgtcgtgaatttggaggctgtgccggcaacattgcgtacaatctgcatctgttgggtggtgctccgatcgtaatggctacggtgggccaagatttcggtccgtatcgcgagcacttcgaaactctgggcattgacttatcccgcgtcaagatcatcgatgatctgagtacaccgcaggccttcattaccaccgacatggatcataaccagattacggcgtttcacggcggcgcaatgatgcgttcgtacgaaaatcacgttcgcgatgtgccgggtgttaccttgggcctcgtaggtcctgatggacgcgagggcatgatccaaaatgccgaagaatttgctgctggtggcattccgttcatttttgacccaggtcaggcagtgccgctgttcaacggcccagaactgcgcgagtttatcgaacaggcggactatgtggtggtcaacgattacgaaagcaatcttcttcaagctcgtactggctggaacgagcaggacattgtttcacgcgtgcaggcgtatatcaccacgcaaggttcggctggagccctggtacatacaccggagaagacctacgatattccgccggctaaaacccgtcgtgtcgttgatccaactggttgcggcgacgcgtttcgcgccggcctgatctatggtattcagcataattatgattggttgaccattggccgcatgggaaacttaatgggtgcgctgaaagtggaacaccctggcacccaaaatcagcgtttcgattttgccgaattcaacgaccagttcaaacaatattttggctacgcgctc

SEQ ID NO: 1200 - protein, 321 aa, synthetic construct
  REGION 1..321: note = variant of adenosine kinase from Xanthemonas campestris
MHHHHHHGGSGMSALICGSLAYDTIMVFPDQFKNHILPDRVHRLNVSFLVPGMRREFGGCAGNIAYNLHLLGGAPIVMATVGQDFGPYREHFETLGIDLSRVKIIDDLSTPQAFITTDMDHNQITAFHGGAMMRSYENHVRDVPGVTLGLVGPDGREGMIQNAEEFAAGGIPFIFDPGQAVPLFNGPELREFIEQADYVVVNDYESNLLQARTGWNEQDIVSRVQAYITTQGSAGALVHTPEKTYDIPPAKTRRVVDPTGCGDAFRAGLIYGIQHNYDWLTIGRMGNLMGALKVEHPGTQNQRFDFAEFNDQFKQYFGYAL

SEQ ID NO: 1201 - DNA, 963 bp, synthetic construct
  misc_feature 1..963: note = variant of adenosine kinase from Xanthemonas campestris
  source 1..963: mol_type = other DNA
atgcaccatcatcaccatcacgggggctccggcatgagtgcactgatttgcggttctttagcgtatgataccatcatggtgtttccggaccagttcaagaaccatattctgcccgatcgtgttcaccgcctcaatgtcagctttcttgtaccgggcatgcgtcgtgaatttggaggctgtgccggcaacattgcgtacaatctgcatctgttgggtggtgctccgatcgtaatggctacggtgggccaagatttcggtccgtatcgcgagcacttcgaaactctgggcattgacttatcccgcgtcaagatcatcgatgatctgagtacaccgcaggccttcattaccaccgacatggatcataaccagattacggcgtttcacggcggcgcaatgatgcgttcgtacgaaaatcacgttcgcgatgtgccgggtgttaccttgggcctcgtaggtcctgatggacgcgagggcatgatccaaaatgccgaagaatttgctgctatgggcattccgttcatttttgacccaggtcaggcagtgccgctgttcaacggcccagaactgcgcgagtttatcgaacaggcggactatgtggtggtcaacgattacgaaagcaatcttcttcaagcccgtactggctggaacgagcaggacattgtttcacgcgtgcaggcgtatatcaccacgcaaggttcggctggagccctggtacatacaccggagaagacctacgatattccgccggctaaaacccgtcgtgtcgttgatccaactggttgcggcgacgcgtttcgcgccggcctgatctatggtattcagcataattatgattggttgaccattggccgcatgggaaacttaatgggtgcgctgaaagtggaacaccctggcacccaaaatcagcgtttcgattttgccgaattcaacgaccagttcaaacaatattttggctacgcgctc

SEQ ID NO: 1202 - protein, 321 aa, synthetic construct
  REGION 1..321: note = variant of adenosine kinase from Xanthemonas campestris
MHHHHHHGGSGMSALICGSLAYDTIMVFPDQFKNHILPDRVHRLNVSFLVPGMRREFGGCAGNIAYNLHLLGGAPIVMATVGQDFGPYREHFETLGIDLSRVKIIDDLSTPQAFITTDMDHNQITAFHGGAMMRSYENHVRDVPGVTLGLVGPDGREGMIQNAEEFAAMGIPFIFDPGQAVPLFNGPELREFIEQADYVVVNDYESNLLQARTGWNEQDIVSRVQAYITTQGSAGALVHTPEKTYDIPPAKTRRVVDPTGCGDAFRAGLIYGIQHNYDWLTIGRMGNLMGALKVEHPGTQNQRFDFAEFNDQFKQYFGYAL

SEQ ID NO: 1203 - DNA, 963 bp, synthetic construct
  misc_feature 1..963: note = variant of adenosine kinase from Xanthemonas campestris
  source 1..963: mol_type = other DNA
atgcaccatcatcaccatcacgggggctccggcatgagtgcactgatttgcggttctttagcgtatgataccatcatggtgtttccggaccagttcaagaaccatattctgcccgatcgtgttcaccgcctcaatgtcagctttcttgtaccggacatgcgtcgtgaatttggaggctgtgccggcaacattgcgtacaatctgcatctgttgggtggtgctccgatcgtaatggctacggtgggccaagatttcggtccgtatcgcgagcacttcgaaactctgggcattgacttatcccgcgtcaagatcatcgatgatctgagtacaccgcaggccttcattaccaccgacatggatcataaccagattacggcgtttcacggcggcgcaatgatgcgttcgtacgaaaatcacgttcgtgatgtgccgggtgttaccttgggcctcgtaggtcctgatggacgcgagggcatgatccaaaatgccgaagaatttgctgctggtggcattccgttcatttttgacccaggtcaggcagtgccgctgttcaacggcccagaactgcgcgagtttatcgaacaggcggactatgtggtggtcaacgattacgaaagcaatcttcttcaagcccgtactggctggaacgagcaggacattgtttcacgcgtgcaggcgtatatcaccacgcaaggttcggctggagccctggtacatacaccggagaagacctacgatattccgccggctaaaacccgtcgtgtcgttgatccaactggttgcggcgacgcgtttcgcgccggcctgatctatggtattcagcataattatgattggttgaccattggccgcatgggaaacttaatgggtgcgctgaaagtggaacaccctggcacccaaaatcagcgtttcgattttgccgaattcaacgaccagttcaaacaatattttggctacgcgctc

SEQ ID NO: 1204 - protein, 321 aa, synthetic construct
  REGION 1..321: note = variant of adenosine kinase from Xanthemonas campestris
MHHHHHHGGSGMSALICGSLAYDTIMVFPDQFKNHILPDRVHRLNVSFLVPDMRREFGGCAGNIAYNLHLLGGAPIVMATVGQDFGPYREHFETLGIDLSRVKIIDDLSTPQAFITTDMDHNQITAFHGGAMMRSYENHVRDVPGVTLGLVGPDGREGMIQNAEEFAAGGIPFIFDPGQAVPLFNGPELREFIEQADYVVVNDYESNLLQARTGWNEQDIVSRVQAYITTQGSAGALVHTPEKTYDIPPAKTRRVVDPTGCGDAFRAGLIYGIQHNYDWLTIGRMGNLMGALKVEHPGTQNQRFDFAEFNDQFKQYFGYAL

SEQ ID NO: 1205 - DNA, 963 bp, synthetic construct
  misc_feature 1..963: note = variant of adenosine kinase from Xanthemonas campestris
  source 1..963: mol_type = other DNA
atgcaccatcatcaccatcacgggggctccggcatgagtgcactgatttgcggttctttagcgtatgataccatcatggtgtttccggaccagttcaagaaccatattctgcccgatcgtctgcaccgcctcaatgtcagctttcttgtaccacgcatgcgtcgtgaatttggaggctgtgccggcaacattgcgtacaatctgcatctgttgggtggtgctccgatcgtaatggctacggtgggccaagatttcggtccgtatcgcgagcacttcgaaactctgggcattgacttatcccgcgtcaagatcatcgatgatctgagtacaccgcaggccttcattaccaccgacatggatcataaccagattacggcgtttcacggcggcgcaatgatgcgttcgtacgaaaatcacgttcgtgatgtgccgggtgttaccttgggcctcgtaggtcctgatggacgcgagggcatgatccaaaatgccgaagaatttgctgctggtggtattccgttcatttttgacccaggtcaggcagtgccgctgttcaacggccccgaactgcgcgagtttatcgaacaggcggactatgtggtggtcaacgattacgaaagcaatcttcttcaagcccgtactggctggaacgagcaggacattgtttcacgcgtgcaggcgtatatcaccacgcaaggttcggctggagccctggtacatacaccggagaagacctacgatattccgccggctaaaacccgtcgtgtcgttgatccaactggttgcggcgacgcgtttcgcgccggcctgatctatggtattcagcataattatgattggttgaccattggccgcatgggaaacttaatgggtgcgctgaaagtggaacaccctggcacccaaaatcagcgtttcgattttgccgaattcaacgatcagttcaaacaatattttggctacgcgctc

SEQ ID NO: 1206 - protein, 321 aa, synthetic construct
  REGION 1..321: note = variant of adenosine kinase from Xanthemonas campestris
MHHHHHHGGSGMSALICGSLAYDTIMVFPDQFKNHILPDRLHRLNVSFLVPRMRREFGGCAGNIAYNLHLLGGAPIVMATVGQDFGPYREHFETLGIDLSRVKIIDDLSTPQAFITTDMDHNQITAFHGGAMMRSYENHVRDVPGVTLGLVGPDGREGMIQNAEEFAAGGIPFIFDPGQAVPLFNGPELREFIEQADYVVVNDYESNLLQARTGWNEQDIVSRVQAYITTQGSAGALVHTPEKTYDIPPAKTRRVVDPTGCGDAFRAGLIYGIQHNYDWLTIGRMGNLMGALKVEHPGTQNQRFDFAEFNDQFKQYFGYAL

SEQ ID NO: 1207 - DNA, 963 bp, synthetic construct
  misc_feature 1..963: note = variant of adenosine kinase from Xanthemonas campestris
  source 1..963: mol_type = other DNA
atgcaccatcatcaccatcacgggggctccggcatgagtgcactgatttgcggttctttagcgtatgataccatcatggtgtttccggaccagttcaagaaccatattctgcccgatcgtgttcaccgcctcaatgtcagctttcttgtaccgggcatgcgtcgtgaatttggaggctgtgccggcaacattgcgtacaatctgcatctgttgggtggtgctccgatcgtaatggctacggtgggccaagatttcggtccgtatcgcgagcacttcgaaactctgggcattgacttatcccgcgtcaagatcatcgatgatctgagtacaccgcaggccttcattaccaccgacatggatcataaccagattacggcgtttcacggcggcgcaatgatgcgttcgtacgaaaatcacgttagcgatgtgccgggtgttaccttgggcctcgtaggtcctgatggacgcgagggcatgatccaaaatgccgaagaatttgctgctatgggcattccgttcatttttgacccaggtcaggcagtgccgctgttcaacggcccagaactgcgcgagtttatcgaacaggcggactatgtggtggtcaacgattacgaaagcaatcttcttcaagcccgtactggctggaacgagcaggacattgtttcacgcgtgcaggcgtatatcaccacgcaaggttcggctggagccctggtacatacaccggagaagacctacgatattccgccggctaaaacccgtcgtgtcgttgatccaactggttgcggcgacgcgtttcgcgccggcctgatctatggtattcagcataattatgattggttgaccattggccgcatgggaaacttaatgggtgcgctgaaagtggaacaccctggcacccaaaatcagcgtttcgattttgccgaattcaacgaccagttcaaacaatattttggctacgcgctc

SEQ ID NO: 1208 - protein, 321 aa, synthetic construct
  REGION 1..321: note = variant of adenosine kinase from Xanthemonas campestris
MHHHHHHGGSGMSALICGSLAYDTIMVFPDQFKNHILPDRVHRLNVSFLVPGMRREFGGCAGNIAYNLHLLGGAPIVMATVGQDFGPYREHFETLGIDLSRVKIIDDLSTPQAFITTDMDHNQITAFHGGAMMRSYENHVSDVPGVTLGLVGPDGREGMIQNAEEFAAMGIPFIFDPGQAVPLFNGPELREFIEQADYVVVNDYESNLLQARTGWNEQDIVSRVQAYITTQGSAGALVHTPEKTYDIPPAKTRRVVDPTGCGDAFRAGLIYGIQHNYDWLTIGRMGNLMGALKVEHPGTQNQRFDFAEFNDQFKQYFGYAL

SEQ ID NO: 1209 - DNA, 963 bp, synthetic construct
  misc_feature 1..963: note = variant of adenosine kinase from Xanthemonas campestris
  source 1..963: mol_type = other DNA
atgcaccatcatcaccatcacgggggctccggcatgagtgcactgatttgcggttctttagcgtatgataccatcatggtgtttccggaccagttcaagaaccatattctgcccgatcgtgttcaccgcctcaatgtcagctttcttgtaccacgcatgcgtcgtgaatttggaggctgtgccggcaacattgcgtacaatctgcatctgttgggtggtgctccgatcgtaatggctacggtgggccaagatttcggtccgtatcgcgagcacttcgaaactctgggcattgacttatcccgcgtcaagatcatcgatgatctgagtacaccgcaggccttcattaccaccgacatggatcataaccagattacggcgtttcacggcggcgcaatgatgcgttcgtacgaaaatcacgttcgtgatgtgccgggtgttaccttgggcctcgtaggtcctgatggacgcgagggcatgatccaaaatgccgaagaatttgctgctatgggcattccgttcatttttgacccaggtcaggcagtgccgctgttcaacggccccgaactgcgcgagtttatcgaacaggcggactatgtggtggtcaacgattacgaaagcaatcttcttcaagcccgtactggctggaacgagcaggacattgtttcacgcgtgcaggcgtatatcaccacgcaaggttcggctggagccctggtacatacaccggagaagacctacgatattccgccggctaaaacccgtcgtgtcgttgatccaactggttgcggcgacgcgtttcgcgccggcctgatctatggtattcagcataattatgattggttgaccattggccgcatgggaaacttaatgggtgcgctgaaagtggaacaccctggcacccaaaatcagcgtttcgattttgccgaattcaacgaccagttcaaacaatattttggctacgcgctc

SEQ ID NO: 1210 - protein, 321 aa, synthetic construct
  REGION 1..321: note = variant of adenosine kinase from Xanthemonas campestris
MHHHHHHGGSGMSALICGSLAYDTIMVFPDQFKNHILPDRVHRLNVSFLVPRMRREFGGCAGNIAYNLHLLGGAPIVMATVGQDFGPYREHFETLGIDLSRVKIIDDLSTPQAFITTDMDHNQITAFHGGAMMRSYENHVRDVPGVTLGLVGPDGREGMIQNAEEFAAMGIPFIFDPGQAVPLFNGPELREFIEQADYVVVNDYESNLLQARTGWNEQDIVSRVQAYITTQGSAGALVHTPEKTYDIPPAKTRRVVDPTGCGDAFRAGLIYGIQHNYDWLTIGRMGNLMGALKVEHPGTQNQRFDFAEFNDQFKQYFGYAL

SEQ ID NO: 1211 - DNA, 963 bp, synthetic construct
  misc_feature 1..963: note = variant of adenosine kinase from Xanthemonas campestris
  source 1..963: mol_type = other DNA
atgcaccatcatcaccatcacgggggctccggcatgagtgcactgatttgcggttctttagcgtatgataccatcatggtgtttccggaccagttcaagaaccatattctgcccgatcgtgttcaccgcctcaatgtcagctttcttgtatcgggcatgcgtcgtgaatttggaggctgtgccggcaacattgcgtacaatctgcatctgttgggtggtgctccgatcgtaatggctacggtgggccaagatttcggtccgtatcgcgagcacttcgaaactctgggcattgacttatcccgcgtcaagatcatcgatgatctgagtacaccgcaggccttcattaccaccgacatggatcataaccagattacggcgtttcacggcggcgcaatgatgcgttcgtacgaaaatcacgttcgtgatgtgccgggtgttaccttgggcctcgtaggtcctgatggacgcgagggcatgatccaaaatgccgaagaatttgctgctggtggcattccgttcatttttgacccaggtcaggcagtgccgctgttcaacggccccgaactgcgcgagtttatcgaacaggcggactatgtggtggtcaacgattacgaaagcaatcttcttcaaatgcgtactggctggaacgagcaggacattgtttcacgcgtgcaggcgtatatcaccacgcaaggttcggctggagccctggtacatacaccggagaagacctacgatattccgccggctaaaacccgtcgtgtcgttgatccaactggttgcggcgacgcgtttcgcgccggcctgatctatggtattcagcataattatgattggttgaccattggccgcatgggaaacttaatgggtgcgctgaaagtggaacaccctggcacccaaaatcagcgtttcgattttgccgaattcaacgaccagttcaaacaatattttggctacgcgctc

SEQ ID NO: 1212 - protein, 321 aa, synthetic construct
  REGION 1..321: note = variant of adenosine kinase from Xanthemonas campestris
MHHHHHHGGSGMSALICGSLAYDTIMVFPDQFKNHILPDRVHRLNVSFLVSGMRREFGGCAGNIAYNLHLLGGAPIVMATVGQDFGPYREHFETLGIDLSRVKIIDDLSTPQAFITTDMDHNQITAFHGGAMMRSYENHVRDVPGVTLGLVGPDGREGMIQNAEEFAAGGIPFIFDPGQAVPLFNGPELREFIEQADYVVVNDYESNLLQMRTGWNEQDIVSRVQAYITTQGSAGALVHTPEKTYDIPPAKTRRVVDPTGCGDAFRAGLIYGIQHNYDWLTIGRMGNLMGALKVEHPGTQNQRFDFAEFNDQFKQYFGYAL

SEQ ID NO: 1213 - DNA, 963 bp, synthetic construct
  misc_feature 1..963: note = variant of adenosine kinase from Xanthemonas campestris
  source 1..963: mol_type = other DNA
atgcaccatcatcaccatcacgggggctccggcatgagtgcactgatttgcggttctttagcgtatgataccatcatggtgtttccggaccagttcaagaaccatattctgcccgatcgtgttcaccgcctcaatgtcagctttcttgtaccgggcatgcgtcgtgaatttggaggctgtgccggcaacattgcgtacaatctgcatctgttgggtggtgctccgatcgtaatggctacggtgggccaagatttcggtccgtatcgcgagcacttcgaaactctgggcattgacttatcccgcgtcaagatcatcgatgatctgagtacaccgcaggccttcattaccaccgacatggatcataaccagattacggcgtttcacggcggcgcaatgatgcgttcgtacgaaaatcacgttagcgatgtgccgggtgttaccttgggcctcgtaggtcctgatggacgcgagggcatgatccaaaatgccgaagaatttgctgctggtggcattccgttcatttttgacccaggtcaggcagtgccgctgttcaacggcgttgaactgcgcgagtttatcgaacaggcggactatgtggtggtcaacgattacgaaagcaatcttcttcaagctcgtactggctggaacgagcaggacattgtttcacgcgtgcaggcgtatatcaccacgcaaggttcggctggagccctggtacatacaccggagaagacctacgatattccgccggctaaaacccgtcgtgtcgttgatccaactggttgcggcgacgcgtttcgcgccggcctgatctatggtattcagcataattatgattggttgaccattggccgcatgggaaacttaatgggtgcgctgaaagtggaacaccctggcacccaaaatcagcgtttcgattttgccgaattcaacgaccagttcaaacaatattttggctacgcgctc

SEQ ID NO: 1214 - protein, 321 aa, synthetic construct
  REGION 1..321: note = variant of adenosine kinase from Xanthemonas campestris
MHHHHHHGGSGMSALICGSLAYDTIMVFPDQFKNHILPDRVHRLNVSFLVPGMRREFGGCAGNIAYNLHLLGGAPIVMATVGQDFGPYREHFETLGIDLSRVKIIDDLSTPQAFITTDMDHNQITAFHGGAMMRSYENHVSDVPGVTLGLVGPDGREGMIQNAEEFAAGGIPFIFDPGQAVPLFNGVELREFIEQADYVVVNDYESNLLQARTGWNEQDIVSRVQAYITTQGSAGALVHTPEKTYDIPPAKTRRVVDPTGCGDAFRAGLIYGIQHNYDWLTIGRMGNLMGALKVEHPGTQNQRFDFAEFNDQFKQYFGYAL

SEQ ID NO: 1215 - DNA, 963 bp, synthetic construct
  misc_feature 1..963: note = variant of adenosine kinase from Xanthemonas campestris
  source 1..963: mol_type = other DNA
atgcaccatcatcaccatcacgggggctccggcatgagtgcactgatttgcggttctttagcgtatgataccatcatggtgtttccggaccagttcaagaaccatattctgcccgatcgtgttcaccgcctcaatgtcagctttcttgtatcggacatgcgtcgtgaatttggaggctgtgccggcaacattgcgtacaatctgcatctgttgggtggtgctccgatcgtaatggctacggtgggccaagatttcggtccgtatcgcgagcacttcgaaactctgggcattgacttatcccgcgtcaagatcatcgatgatctgagtacaccgcaggccttcattaccaccgacatggatcataaccagattacggcgtttcacggcggcgcaatgatgcgttcgtacgaaaatcacgttcgtgatgtgccgggtgttaccttgggcctcgtaggtcctgatggacgcgagggcatgatccaaaatgccgaagaatttgctgctggtggcattccgttcatttttgacccaggtcaggcagtgccgctgttcaacggccccgaactgcgcgagtttatcgaacaggcggactatgtggtggtcaacgattacgaaagcaatcttcttcaagctcgtactggctggaacgagcaggacattgtttcacgcgtgcaggcgtatatcaccacgcaaggttcggctggagccctggtacatacaccggagaagacctacgatattccgccggctaaaacccgtcgtgtcgttgatccaactggttgcggcgacgcgtttcgcgccggcctgatctatggtattcagcataattatgattggttgaccattggccgcatgggaaacttaatgggtgcgctgaaagtggaacaccctggcacccaaaatcagcgtttcgattttgccgaattcaacgaccagttcaaacaatattttggctacgcgctc

SEQ ID NO: 1216 - protein, 321 aa, synthetic construct
  REGION 1..321: note = variant of adenosine kinase from Xanthemonas campestris
MHHHHHHGGSGMSALICGSLAYDTIMVFPDQFKNHILPDRVHRLNVSFLVSDMRREFGGCAGNIAYNLHLLGGAPIVMATVGQDFGPYREHFETLGIDLSRVKIIDDLSTPQAFITTDMDHNQITAFHGGAMMRSYENHVRDVPGVTLGLVGPDGREGMIQNAEEFAAGGIPFIFDPGQAVPLFNGPELREFIEQADYVVVNDYESNLLQARTGWNEQDIVSRVQAYITTQGSAGALVHTPEKTYDIPPAKTRRVVDPTGCGDAFRAGLIYGIQHNYDWLTIGRMGNLMGALKVEHPGTQNQRFDFAEFNDQFKQYFGYAL

SEQ ID NO: 1217 - DNA, 963 bp, synthetic construct
  misc_feature 1..963: note = variant of adenosine kinase from Xanthemonas campestris
  source 1..963: mol_type = other DNA
atgcaccatcatcaccatcacgggggctccggcatgagtgcactgatttgcggttctttagcgtatgataccatcatggtgtttccggaccagttcaagaaccatattctgcccgatcgtgttcaccgcctcaatgtcagctttcttgtaccacgcatgcgtcgtgaatttggaggctgtgccggcaacattgcgtacaatctgcatctgttgggtggtgctccgatcgtaatggctacggtgggccaagatttcggtccgtatcgcgagcacttcgaaactctgggcattgacttatcccgcgtcaagatcatcgatgatctgagtacaccgcaggccttcattaccaccgacatggatcataaccagattacggcgtttcacggcggcgcaatgatgcgttcgtacgaaaatcacgttagcgatgtgccgggtgttaccttgggcctcgtaggtcctgatggacgcgagggcatgatccaaaatgccgaagaatttgctgctggtggcattccgttcatttttgacccaggtcaggcagtgccgctgttcaacggccccgaactgcgcgagtttatcgaacaggcggactatgtggtggtcaacgattacgaaagcaatcttcttcaagcccgtactggctggaacgagcaggacattgtttcacgcgtgcaggcgtatatcaccacgcaaggttcggctggagccctggtacatacaccggagaagacctacgatattccgccggctaaaacccgtcgtgtcgttgatccaactggttgcggcgacgcgtttcgcgccggcctgatctatggtattcagcataattatgattggttgaccattggccgcatgggaaacttaatgggtgcgctgaaagtggaacaccctggcacccaaaatcagcgtttcgattttgccgaattcaacgaccagttcaaacaatattttggctacgcgctc

SEQ ID NO: 1218 - protein, 321 aa, synthetic construct
  REGION 1..321: note = variant of adenosine kinase from Xanthemonas campestris
MHHHHHHGGSGMSALICGSLAYDTIMVFPDQFKNHILPDRVHRLNVSFLVPRMRREFGGCAGNIAYNLHLLGGAPIVMATVGQDFGPYREHFETLGIDLSRVKIIDDLSTPQAFITTDMDHNQITAFHGGAMMRSYENHVSDVPGVTLGLVGPDGREGMIQNAEEFAAGGIPFIFDPGQAVPLFNGPELREFIEQADYVVVNDYESNLLQARTGWNEQDIVSRVQAYITTQGSAGALVHTPEKTYDIPPAKTRRVVDPTGCGDAFRAGLIYGIQHNYDWLTIGRMGNLMGALKVEHPGTQNQRFDFAEFNDQFKQYFGYAL

SEQ ID NO: 1219 - DNA, 963 bp, synthetic construct
  misc_feature 1..963: note = variant of adenosine kinase from Xanthemonas campestris
  source 1..963: mol_type = other DNA
atgcaccatcatcaccatcacgggggctccggcatgagtgcactgatttgcggttctttagcgtatgataccatcatggtgtttccggaccagttcaagaaccatattctgcccgatcgtctgcaccgcctcaatgtcagctttcttgtaccacgcatgcgtcgtgaatttggaggctgtgccggcaacattgcgtacaatctgcatctgttgggtggtgctccgatcgtaatggctacggtgggccaagatttcggtccgtatcgcgagcacttcgaaactctgggcattgacttatcccgcgtcctgatcatcgatgatctgagtacaccgcaggccttcattaccaccgacatggatcataaccagattacggcgtttcacggcggcgcaatgatgcgttcgtacgaaaatcacgttcgtgatgtgccgggtgttaccttgggcctcgtaggtcctgatggacgcgagggcatgatccaaaatgccgaagaatttgctgctggtggcattccgttcatttttgacccaggtcaggcagtgccgctgttcaacggccccgaactgcgcgagtttatcgaacaggcggactatgtggtggtcaacgattacgaaagcaatcttcttcaagcccgtactggctggaacgagcaggacattgtttcacgcgtgcaggcgtatatcaccacgcaaggttcggctggagccctggtacatacaccggagaagacctacgatattccgccggctaaaacccgtcgtgtcgttgatccaactggttgcggcgacgcgtttcgcgccggcctgatctatggtattcagcataattatgattggttgaccattggccgcatgggaaacttaatgggtgcgctgaaagtggaacaccctggcacccaaaatcagcgtttcgattttgccgaattcaacgatcagttcaaacaatattttggctacgcgctc

SEQ ID NO: 1220 - protein, 321 aa, synthetic construct
  REGION 1..321: note = variant of adenosine kinase from Xanthemonas campestris
MHHHHHHGGSGMSALICGSLAYDTIMVFPDQFKNHILPDRLHRLNVSFLVPRMRREFGGCAGNIAYNLHLLGGAPIVMATVGQDFGPYREHFETLGIDLSRVLIIDDLSTPQAFITTDMDHNQITAFHGGAMMRSYENHVRDVPGVTLGLVGPDGREGMIQNAEEFAAGGIPFIFDPGQAVPLFNGPELREFIEQADYVVVNDYESNLLQARTGWNEQDIVSRVQAYITTQGSAGALVHTPEKTYDIPPAKTRRVVDPTGCGDAFRAGLIYGIQHNYDWLTIGRMGNLMGALKVEHPGTQNQRFDFAEFNDQFKQYFGYAL

SEQ ID NO: 1221 - DNA, 963 bp, synthetic construct
  misc_feature 1..963: note = variant of adenosine kinase from Xanthemonas campestris
  source 1..963: mol_type = other DNA
atgcaccatcatcaccatcacgggggctccggcatgagtgcactgatttgcggttctttagcgtatgataccatcatggtgtttccggaccagttcaagaaccatattctgcccgatcgtgtgcaccgcctcaatgtcagctttcttgtaccacgcatgcgtcgtgaatttggaggctgtgccggcaacattgcgtacaatctgcatctgttgggtggtgctccgatcgtaatggctacggtgggccaagatttcggtccgtatcgcgagcacttcgaaactctgggcattgacttatcccgcgtcaagatcatcgatgatctgagtacaccgcaggccttcattaccaccgacatggatcataaccagattacggcgtttcacggcggcgcaatgatgcgttcgtacgaaaatcacgttcgtgatgtgccgggtgttaccttgggcctcgtaggtcctgatggacgcgagggcatgatccaaaatgccgaagaatttgctgctggtggcattccgttcatttttgacccaggtcaggcagtgccgctgttcaacggccccgaactgcgcgagtttatcgaacaggcggactatgtggtggtcaacgattacgaaagcaatcttcttcaagcccgtactggctggaacgagcaggacattgtttcacgcgtgcaggcgtatatcaccacgcaaggttcggctggagccctggtacatacaccggagaagacctacgatattccgccggctaaaacccgtcgtgtcgttgatccaactggttgcggcgacgcgtttcgcgccggcctgatctatggtattcagcataattatgattggttgaccattggccgcatgggaaacttaatgggtgcgctgaaagtggaacaccctggcacccaaaatcagcgtttcgattttgccgaattcaaccagcagttcaaacaatattttggctacgcgctc

SEQ ID NO: 1222 - protein, 321 aa, synthetic construct
  REGION 1..321: note = variant of adenosine kinase from Xanthemonas campestris
MHHHHHHGGSGMSALICGSLAYDTIMVFPDQFKNHILPDRVHRLNVSFLVPRMRREFGGCAGNIAYNLHLLGGAPIVMATVGQDFGPYREHFETLGIDLSRVKIIDDLSTPQAFITTDMDHNQITAFHGGAMMRSYENHVRDVPGVTLGLVGPDGREGMIQNAEEFAAGGIPFIFDPGQAVPLFNGPELREFIEQADYVVVNDYESNLLQARTGWNEQDIVSRVQAYITTQGSAGALVHTPEKTYDIPPAKTRRVVDPTGCGDAFRAGLIYGIQHNYDWLTIGRMGNLMGALKVEHPGTQNQRFDFAEFNQQFKQYFGYAL

SEQ ID NO: 1223 - DNA, 963 bp, synthetic construct
  misc_feature 1..963: note = variant of adenosine kinase from Xanthemonas campestris
  source 1..963: mol_type = other DNA
atgcaccatcatcaccatcacgggggctccggcatgagtgcactgatttgcggttctttagcgtatgataccatcatggtgtttccggaccagttcaagaaccatattctgcccgatcgtgtgcaccgcctcaatgtcagctttcttgtaccacgcatgcgtcgtgaatttggaggctgtgccggcaacattgcgtacaatctgcatctgttgggtggtgctccgatcgtaatggctacggtgggccaagatttcggtccgtatcgcgagcacttcgaaactctgggcattgacttatcccgcgtcaagatcatcgatgatctgagtacaccgcaggccttcattaccaccgacatggatcataaccagattacggcgtttcacggcggcgcaatgatgcgttcgtacgaaaatcacgttcgtgatgtgccgggtgttaccttgggcctcgtaggtcctgatggacgcgagggcatgatccaaaatgccgaagaatttttcgctggtggtattccgttcatttttgacccaggtcaggcagtgccgctgttcaacggccccgaactgcgcgagtttatcgaacaggcggactatgtggtggtcaacgattacgaaagcaatcttcttcaagcccgtactggctggaacgagcaggacattgtttcacgcgtgcaggcgtatatcaccacgcaaggttcggctggagccctggtacatacaccggagaagacctacgatattccgccggctaaaacccgtcgtgtcgttgatccaactggttgcggcgacgcgtttcgcgccggcctgatctatggtattcagcataattatgattggttgaccattggccgcatgggaaacttaatgggtgcgctgaaagtggaacaccctggcacccaaaatcagcgtttcgattttgccgaattcaacgaccagttcaaacaatattttggctacgcgctc

SEQ ID NO: 1224 - protein, 321 aa, synthetic construct
  REGION 1..321: note = variant of adenosine kinase from Xanthemonas campestris
MHHHHHHGGSGMSALICGSLAYDTIMVFPDQFKNHILPDRVHRLNVSFLVPRMRREFGGCAGNIAYNLHLLGGAPIVMATVGQDFGPYREHFETLGIDLSRVKIIDDLSTPQAFITTDMDHNQITAFHGGAMMRSYENHVRDVPGVTLGLVGPDGREGMIQNAEEFFAGGIPFIFDPGQAVPLFNGPELREFIEQADYVVVNDYESNLLQARTGWNEQDIVSRVQAYITTQGSAGALVHTPEKTYDIPPAKTRRVVDPTGCGDAFRAGLIYGIQHNYDWLTIGRMGNLMGALKVEHPGTQNQRFDFAEFNDQFKQYFGYAL

SEQ ID NO: 1225 - DNA, 963 bp, synthetic construct
  misc_feature 1..963: note = variant of adenosine kinase from Xanthemonas campestris
  source 1..963: mol_type = other DNA
atgcaccatcatcaccatcacgggggctccggcatgagtgcactgatttgcggttctttagcgtatgataccatcatggtgtttccggaccagttcaagaaccatattctgcccgatcgtctgcaccgcctcaatgtcagctttcttgtaccacgcatgcgtcgtgaatttggaggctgtgccggcaacattgcgtacaatctgcatctgttgggtggtgctccgatcgtaatggctacggtgggccaagatttcggtccgtatcgcgagcacttcgaaactctgggcattgacttatcccgcgtcaagatcatcgatgatctgagtacaccgcaggccttcattaccaccgacatggatcataaccagattacggcgtttcacggcggcgcaatgatgcgttcgtacgaaaatcacgttcgtgatgtgccgggtgttaccttgggcctcgtaggtcctgatggacgcgagggcatgatccaaaatgccgaagaatttgcggctggtggtattccgttcatttttgacccaggtcaggcagtgccgctgttcaacggccccgaactgcgcgagtttatcgaacaggcggactatgtggtggtcaacgattacgaaagcaatcttcttcaagcccgtactggctggaacgagcaggacattgtttcacgcgtgcaggcgtatatcaccacgcaaggttcggctggagccctggtacatacaccggagaagacctacgatattccgccggctaaaacccgtcgtgtcgttgatccaactggttgcggcgacgcgtttcgcgccggcctgatctatggtattcagcataattatgattggttgaccattggccgcatgggaaacttaatgggtgcgctgaaagtggaacaccctggcacccaaaatcagcgtttcgattttgccgaattcaaccagcagttcaaacaatattttggctacgcgctc

SEQ ID NO: 1226 - protein, 321 aa, synthetic construct
  REGION 1..321: note = variant of adenosine kinase from Xanthemonas campestris
MHHHHHHGGSGMSALICGSLAYDTIMVFPDQFKNHILPDRLHRLNVSFLVPRMRREFGGCAGNIAYNLHLLGGAPIVMATVGQDFGPYREHFETLGIDLSRVKIIDDLSTPQAFITTDMDHNQITAFHGGAMMRSYENHVRDVPGVTLGLVGPDGREGMIQNAEEFAAGGIPFIFDPGQAVPLFNGPELREFIEQADYVVVNDYESNLLQARTGWNEQDIVSRVQAYITTQGSAGALVHTPEKTYDIPPAKTRRVVDPTGCGDAFRAGLIYGIQHNYDWLTIGRMGNLMGALKVEHPGTQNQRFDFAEFNQQFKQYFGYAL

SEQ ID NO: 1227 - DNA, 963 bp, synthetic construct
  misc_feature 1..963: note = variant of adenosine kinase from Xanthemonas campestris
  source 1..963: mol_type = other DNA
atgcaccatcatcaccatcacgggggctccggcatgagtgcactgatttgcggttctttagcgtatgataccatcatggtgtttccggaccagttcaagaaccatattctgcccgatcgtgttcaccgcctcaatgtcagctttcttgtatcgggcatgcgtcgtgaatttggaggctgtgccggcaacattgcgtacaatctgcatctgttgggtggtgctccgatcgtaatggctacggtgggccaagatttcggtccgtatcgcgagcacttcgaaactctgggcattgacttatcccgcgtcaagatcatcgatgatctgagtacaccgcaggccttcattaccaccgacatggatcataaccagattacggcgtttcacggcggcgcaatgatgcgttcgtacgaaaatcacgttcgtgatgtgccgggtgttaccttgggcctcgtaggtcctgatggacgcgagggcatgatccaaaatgccgaagaatttgctgctggtggcattccgttcatttttgacccaggtcaggcagtgccgctgttcaacggcccagaactgcgcgagtttatcgaacaggcggactatgtggtggtcaacgattacgaaagcaatcttcttcaagcccgtactggctggaacgagcaggacattgtttcacgcgtgcaggcgtatatcaccacgcaaggttcggctggagccctggtacatacaccggagaagacctacgatattccgccggctaaaacccgtcgtgtcgttgatccaactggttgcggcgacgcgtttcgcgccggcctgatctatggtattcagcataattatgattggttgaccattggccgcatgggaaacttaatgggtgcgctgaaagtggaacaccctggcacccaaaatcagcgtttcgattttgccgaattcaacgaccagttcaaacaatattttggctacgcgctc

SEQ ID NO: 1228 - protein, 321 aa, synthetic construct
  REGION 1..321: note = variant of adenosine kinase from Xanthemonas campestris
MHHHHHHGGSGMSALICGSLAYDTIMVFPDQFKNHILPDRVHRLNVSFLVSGMRREFGGCAGNIAYNLHLLGGAPIVMATVGQDFGPYREHFETLGIDLSRVKIIDDLSTPQAFITTDMDHNQITAFHGGAMMRSYENHVRDVPGVTLGLVGPDGREGMIQNAEEFAAGGIPFIFDPGQAVPLFNGPELREFIEQADYVVVNDYESNLLQARTGWNEQDIVSRVQAYITTQGSAGALVHTPEKTYDIPPAKTRRVVDPTGCGDAFRAGLIYGIQHNYDWLTIGRMGNLMGALKVEHPGTQNQRFDFAEFNDQFKQYFGYAL

SEQ ID NO: 1229 - DNA, 963 bp, synthetic construct
  misc_feature 1..963: note = variant of adenosine kinase from Xanthemonas campestris
  source 1..963: mol_type = other DNA
atgcaccatcatcaccatcacgggggctccggcatgagtgcactgatttgcggttctttagcgtatgataccatcatggtgtttccggaccagttcaagaaccatattctgcccgatcgtgttcaccgcctcaatgtcagctttcttgtaccacgcatgcgtcgtgaatttggaggctgtgccggcaacattgcgtacaatctgcatctgttgggtggtgctccgatcgtaatggctacggtgggccaagatttcggtccgtatcgcgagcacttcgaaactctgggcattgacttatcccgcgtcaagatcatcgatgatctgagtacaccgcaggccttcattaccaccgacatggatcataaccagattacggcgtttcacggcggcgcaatgctgcgttcgtacgaaaatcacgttcgtgatgtgccgggtgttaccttgggcctcgtaggtcctgatggacgcgagggcatgatccaaaatgccgaagaatttgctgctggtggcattccgttcatttttgacccaggtcaggcagtgccgctgttcaacggccccgaactgcgcgagtttatcgaacaggcggactatgtggtggtcaacgattacgaaagcaatcttcttcaagcccgtactggctggaacgagcaggacattgtttcacgcgtgcaggcgtatatcaccacgcaaggttcggctggagccctggtacatacaccggagaagacctacgatattccgccggctaaaacccgtcgtgtcgttgatccaactggttgcggcgacgcgtttcgcgccggcctgatctatggtattcagcataattatgattggttgaccattggccgcatgggaaacttaatgggtgcgctgaaagtggaacaccctggcacccaaaatcagcgtttcgattttgccgaattcaacgaccagttcaaacaatattttggctacgcgctc

SEQ ID NO: 1230 - protein, 321 aa, synthetic construct
  REGION 1..321: note = variant of adenosine kinase from Xanthemonas campestris
MHHHHHHGGSGMSALICGSLAYDTIMVFPDQFKNHILPDRVHRLNVSFLVPRMRREFGGCAGNIAYNLHLLGGAPIVMATVGQDFGPYREHFETLGIDLSRVKIIDDLSTPQAFITTDMDHNQITAFHGGAMLRSYENHVRDVPGVTLGLVGPDGREGMIQNAEEFAAGGIPFIFDPGQAVPLFNGPELREFIEQADYVVVNDYESNLLQARTGWNEQDIVSRVQAYITTQGSAGALVHTPEKTYDIPPAKTRRVVDPTGCGDAFRAGLIYGIQHNYDWLTIGRMGNLMGALKVEHPGTQNQRFDFAEFNDQFKQYFGYAL

SEQ ID NO: 1231 - DNA, 963 bp, synthetic construct
  misc_feature 1..963: note = variant of adenosine kinase from Xanthemonas campestris
  source 1..963: mol_type = other DNA
atgcaccatcatcaccatcacgggggctccggcatgagtgcactgatttgcggttctttagcgtatgataccatcatggtgtttccggaccagttcaagaaccatattctgcccgatcgtgttcaccgcctcaatgtcagctttcttgtaccacgcatgcgtcgtgaatttggaggctgtgccggcaacattgcgtacaatctgcatctgttgggtggtgctccgatcgtaatggctacggtgggccaagatttcggtccgtatcgcgagcacttcgaaactctgggcattgacttatcccgcgtcaagatcatcgatgatctgagtacaccgcaggccttcattaccaccgacatggatcataaccagattacggcgtttcacggcggcgcaatgatgcgttcgtacgaaaatcacgttcgtgatgtgccgggtgttaccttgggcctcgtaggtcctgatggacgcgagggcatgatccaaaatgccgaagaatttgctgctggtggcattccgttcatttttgacccaggtcaggcagtgccgctgttcaacggccccgaactgcgcgagtttatcgaacaggcggactatgtggtggtcaacgattacgaaagccgtcttcttcaagcccgtactggctggaacgagcaggacattgtttcacgcgtgcaggcgtatatcaccacgcaaggttcggctggagccctggtacatacaccggagaagacctacgatattccgccggctaaaacccgtcgtgtcgttgatccaactggttgcggcgacgcgtttcgcgccggcctgatctatggtattcagcataattatgattggttgaccattggccgcatgggaaacttaatgggtgcgctgaaagtggaacaccctggcacccaaaatcagcgtttcgattttgccgaattcaacgaccagttcaaacaatattttggctacgcgctc

SEQ ID NO: 1232 - protein, 321 aa, synthetic construct
  REGION 1..321: note = variant of adenosine kinase from Xanthemonas campestris
MHHHHHHGGSGMSALICGSLAYDTIMVFPDQFKNHILPDRVHRLNVSFLVPRMRREFGGCAGNIAYNLHLLGGAPIVMATVGQDFGPYREHFETLGIDLSRVKIIDDLSTPQAFITTDMDHNQITAFHGGAMMRSYENHVRDVPGVTLGLVGPDGREGMIQNAEEFAAGGIPFIFDPGQAVPLFNGPELREFIEQADYVVVNDYESRLLQARTGWNEQDIVSRVQAYITTQGSAGALVHTPEKTYDIPPAKTRRVVDPTGCGDAFRAGLIYGIQHNYDWLTIGRMGNLMGALKVEHPGTQNQRFDFAEFNDQFKQYFGYAL

SEQ ID NO: 1233 - DNA, 963 bp, synthetic construct
  misc_feature 1..963: note = variant of adenosine kinase from Xanthemonas campestris
  source 1..963: mol_type = other DNA
atgcaccatcatcaccatcacgggggctccggcatgagtgttctgatttgcggttctttagcgtatgataccatcatggtgtttccggaccagttcaagaaccatattctgcccgatcgtgttcaccgcctcaatgtcagctttcttgtaccacgcatgcgtcgtgaatttggaggctgtgccggcaacattgcgtacaatctgcatctgttgggtggtgctccgatcgtaatggctacggtgggccaagatttcggtccgtatcgcgagcacttcgaaactctgggcattgacttatcccgcgtcaagatcatcgatgatctgagtacaccgcaggccttcattaccaccgacatggatcataaccagattacggcgtttcacggcggcgcaatgatgcgttcgtacgaaaatcacgttcgtgatgtgccgggtgttaccttgggcctcgtaggtcctgatggacgcgagggcatgatccaaaatgccgaagaatttgctgctggtggcattccgttcatttttgacccaggtcaggcagtgccgctgttcaacggccccgaactgcgcgagtttatcgaacaggcggactatgtggtggtcaacgattacgaaagcaatcttcttcaagcccgtactggctggaacgagcaggacattgtttcacgcgtgcaggcgtatatcaccacgcaaggttcggctggagccctggtacatacaccggagaagacctacgatattccgccggctaaaacccgtcgtgtcgttgatccaactggttgcggcgacgcgtttcgcgccggcctgatctatggtattcagcataattatgattggttgaccattggccgcatgggaaacttaatgggtgcgctgaaagtggaacaccctggcacccaaaatcagcgtttcgattttgccgaattcaacgaccagttcaaacaatattttggctacgcgctc

SEQ ID NO: 1234 - protein, 321 aa, synthetic construct
  REGION 1..321: note = variant of adenosine kinase from Xanthemonas campestris
MHHHHHHGGSGMSVLICGSLAYDTIMVFPDQFKNHILPDRVHRLNVSFLVPRMRREFGGCAGNIAYNLHLLGGAPIVMATVGQDFGPYREHFETLGIDLSRVKIIDDLSTPQAFITTDMDHNQITAFHGGAMMRSYENHVRDVPGVTLGLVGPDGREGMIQNAEEFAAGGIPFIFDPGQAVPLFNGPELREFIEQADYVVVNDYESNLLQARTGWNEQDIVSRVQAYITTQGSAGALVHTPEKTYDIPPAKTRRVVDPTGCGDAFRAGLIYGIQHNYDWLTIGRMGNLMGALKVEHPGTQNQRFDFAEFNDQFKQYFGYAL

SEQ ID NO: 1235 - DNA, 963 bp, synthetic construct
  misc_feature 1..963: note = variant of adenosine kinase from Xanthemonas campestris
  source 1..963: mol_type = other DNA
atgcaccatcatcaccatcacgggggctccggcatgagtgcactgatttgcggttctttagcgtatgataccatcatggtgtttccggaccagttcaagcgtcatattctgcccgatcgtgttcaccgcctcaatgtcagctttcttgtaccacgcatgcgtcgtgaatttggaggctgtgccggcaacattgcgtacaatctgcatctgttgggtggtgctccgatcgtaatggctacggtgggccaagatttcggtccgtatcgcgagcacttcgaaactctgggcattgacttatcccgcgtcaagatcatcgatgatctgagtacaccgcaggccttcattaccaccgacatggatcataaccagattacggcgtttcacggcggcgcaatgatgcgttcgtacgaaaatcacgttcgtgatgtgccgggtgttaccttgggcctcgtaggtcctgatggacgcgagggcatgatccaaaatgccgaagaatttgctgctggtggcattccgttcatttttgacccaggtcaggcagtgccgctgttcaacggccccgaactgcgcgagtttatcgaacaggcggactatgtggtggtcaacgattacgaaagcaatcttcttcaagcccgtactggctggaacgagcaggacattgtttcacgcgtgcaggcgtatatcaccacgcaaggttcggctggagccctggtacatacaccggagaagacctacgatattccgccggctaaaacccgtcgtgtcgttgatccaactggttgcggcgacgcgtttcgcgccggcctgatctatggtattcagcataattatgattggttgaccattggccgcatgggaaacttaatgggtgcgctgaaagtggaacaccctggcacccaaaatcagcgtttcgattttgccgaattcaacgaccagttcaaacaatattttggctacgcgctc

SEQ ID NO: 1236 - protein, 321 aa, synthetic construct
  REGION 1..321: note = variant of adenosine kinase from Xanthemonas campestris
MHHHHHHGGSGMSALICGSLAYDTIMVFPDQFKRHILPDRVHRLNVSFLVPRMRREFGGCAGNIAYNLHLLGGAPIVMATVGQDFGPYREHFETLGIDLSRVKIIDDLSTPQAFITTDMDHNQITAFHGGAMMRSYENHVRDVPGVTLGLVGPDGREGMIQNAEEFAAGGIPFIFDPGQAVPLFNGPELREFIEQADYVVVNDYESNLLQARTGWNEQDIVSRVQAYITTQGSAGALVHTPEKTYDIPPAKTRRVVDPTGCGDAFRAGLIYGIQHNYDWLTIGRMGNLMGALKVEHPGTQNQRFDFAEFNDQFKQYFGYAL

SEQ ID NO: 1237 - DNA, 963 bp, synthetic construct
  misc_feature 1..963: note = variant of adenosine kinase from Xanthemonas campestris
  source 1..963: mol_type = other DNA
atgcaccatcatcaccatcacgggggctccggcatgagtgcactgatttgcggttctttagcgtatgataccatcatggtgtttccggaccagttcaagaaccatattctgcccgatcgtgttcaccgcctcaatgtcagctttcttgtaccacgcatgcgtcgtgaatttggaggctgtgccggcaacattgcgtacaatctgcatctgttgggtggtgctccgatcgtaatggctacggtgggccaagatttcggtccgtatcgcgagcacttcgaaactctgggcattgacttatcccgcgtcaagatcatcgatgatctgagtacaccgcaggccttcattaccaccgacatggatcataaccagattacggcgtttcacggcggcgcaatgatgcgttcgtacgaaaatcacgttcgtgatgtgccgggtgttaccttgggcctcgtaggtcctgatggacgcgagggcatgatccaaaatgccgaagaatttgctgctggtggcattccgttcatttttgacccaggtcaggcagtgccgctgttcaacggccccgaactgcgcgagtttatcgaacaggcggactatgtggtggtcaacgattacgaaagcaatcttcttcaagcccgtactggctggaacgagcaggacattgtttcacgcgtgcaggcgtatatcaccacgcaaggttcggctggagccctggtacatacacgtgagaagacctacgatattccgccggctaaaacccgtcgtgtcgttgatccaactggttgcggcgacgcgtttcgcgccggcctgatctatggtattcagcataattatgattggttgaccattggccgcatgggaaacttaatgggtgcgctgaaagtggaacaccctggcacccaaaatcagcgtttcgattttgccgaattcaacgaccagttcaaacaatattttggctacgcgctc

SEQ ID NO: 1238 - protein, 321 aa, synthetic construct
  REGION 1..321: note = variant of adenosine kinase from Xanthemonas campestris
MHHHHHHGGSGMSALICGSLAYDTIMVFPDQFKNHILPDRVHRLNVSFLVPRMRREFGGCAGNIAYNLHLLGGAPIVMATVGQDFGPYREHFETLGIDLSRVKIIDDLSTPQAFITTDMDHNQITAFHGGAMMRSYENHVRDVPGVTLGLVGPDGREGMIQNAEEFAAGGIPFIFDPGQAVPLFNGPELREFIEQADYVVVNDYESNLLQARTGWNEQDIVSRVQAYITTQGSAGALVHTREKTYDIPPAKTRRVVDPTGCGDAFRAGLIYGIQHNYDWLTIGRMGNLMGALKVEHPGTQNQRFDFAEFNDQFKQYFGYAL

SEQ ID NO: 1239 - DNA, 963 bp, synthetic construct
  misc_feature 1..963: note = variant of adenosine kinase from Xanthemonas campestris
  source 1..963: mol_type = other DNA
atgcaccatcatcaccatcacgggggctccggcatgagtgcactgatttgcggttctttagcgtatgataccatcatggtgtttccggaccagttccagaaccatattctgcccgatcgtgttcaccgcctcaatgtcagctttcttgtaccacgcatgcgtcgtgaatttggaggctgtgccggcaacattgcgtacaatctgcatctgttgggtggtgctccgatcgtaatggctacggtgggccaagatttcggtccgtatcgcgagcacttcgaaactctgggcattgacttatcccgcgtcaagatcatcgatgatctgagtacaccgcaggccttcattaccaccgacatggatcataaccagattacggcgtttcacggcggcgcaatgatgcgttcgtacgaaaatcacgttcgtgatgtgccgggtgttaccttgggcctcgtaggtcctgatggacgcgagggcatgatccaaaatgccgaagaatttgctgctggtggcattccgttcatttttgacccaggtcaggcagtgccgctgttcaacggccccgaactgcgcgagtttatcgaacaggcggactatgtggtggtcaacgattacgaaagcaatcttcttcaagcccgtactggctggaacgagcaggacattgtttcacgcgtgcaggcgtatatcaccacgcaaggttcggctggagccctggtacatacaccggagaagacctacgatattccgccggctaaaacccgtcgtgtcgttgatccaactggttgcggcgacgcgtttcgcgccggcctgatctatggtattcagcataattatgattggttgaccattggccgcatgggaaacttaatgggtgcgctgaaagtggaacaccctggcacccaaaatcagcgtttcgattttgccgaattcaacgaccagttcaaacaatattttggctacgcgctc

SEQ ID NO: 1240 - protein, 321 aa, synthetic construct
  REGION 1..321: note = variant of adenosine kinase from Xanthemonas campestris
MHHHHHHGGSGMSALICGSLAYDTIMVFPDQFQNHILPDRVHRLNVSFLVPRMRREFGGCAGNIAYNLHLLGGAPIVMATVGQDFGPYREHFETLGIDLSRVKIIDDLSTPQAFITTDMDHNQITAFHGGAMMRSYENHVRDVPGVTLGLVGPDGREGMIQNAEEFAAGGIPFIFDPGQAVPLFNGPELREFIEQADYVVVNDYESNLLQARTGWNEQDIVSRVQAYITTQGSAGALVHTPEKTYDIPPAKTRRVVDPTGCGDAFRAGLIYGIQHNYDWLTIGRMGNLMGALKVEHPGTQNQRFDFAEFNDQFKQYFGYAL

SEQ ID NO: 1241 - DNA, 963 bp, synthetic construct
  misc_feature 1..963: note = variant of adenosine kinase from Xanthemonas campestris
  source 1..963: mol_type = other DNA
atgcaccatcatcaccatcacgggggctccggcatgagtgcactgatttgcggttctttagcgtatgataccatcatgtcgtttccggaccagttcaagaaccatattctgcccgatcgtgttcaccgcctcaatgtcagctttcttgtaccacgcatgcgtcgtgaatttggaggctgtgccggcaacattgcgtacaatctgcatctgttgggtggtgctccgatcgtaatggctacggtgggccaagatttcggtccgtatcgcgagcacttcgaaactctgggcattgacttatcccgcgtcaagatcatcgatgatctgagtacaccgcaggccttcattaccaccgacatggatcataaccagattacggcgtttcacggcggcgcaatgatgcgttcgtacgaaaatcacgttcgtgatgtgccgggtgttaccttgggcctcgtaggtcctgatggacgcgagggcatgatccaaaatgccgaagaatttgctgctggtggcattccgttcatttttgacccaggtcaggcagtgccgctgttcaacggccccgaactgcgcgagtttatcgaacaggcggactatgtggtggtcaacgattacgaaagcaatcttcttcaagcccgtactggctggaacgagcaggacattgtttcacgcgtgcaggcgtatatcaccacgcaaggttcggctggagccctggtacatacaccggagaagacctacgatattccgccggctaaaacccgtcgtgtcgttgatccaactggttgcggcgacgcgtttcgcgccggcctgatctatggtattcagcataattatgattggttgaccattggccgcatgggaaacttaatgggtgcgctgaaagtggaacaccctggcacccaaaatcagcgtttcgattttgccgaattcaacgaccagttcaaacaatattttggctacgcgctc

SEQ ID NO: 1242 - protein, 321 aa, synthetic construct
  REGION 1..321: note = variant of adenosine kinase from Xanthemonas campestris
MHHHHHHGGSGMSALICGSLAYDTIMSFPDQFKNHILPDRVHRLNVSFLVPRMRREFGGCAGNIAYNLHLLGGAPIVMATVGQDFGPYREHFETLGIDLSRVKIIDDLSTPQAFITTDMDHNQITAFHGGAMMRSYENHVRDVPGVTLGLVGPDGREGMIQNAEEFAAGGIPFIFDPGQAVPLFNGPELREFIEQADYVVVNDYESNLLQARTGWNEQDIVSRVQAYITTQGSAGALVHTPEKTYDIPPAKTRRVVDPTGCGDAFRAGLIYGIQHNYDWLTIGRMGNLMGALKVEHPGTQNQRFDFAEFNDQFKQYFGYAL

SEQ ID NO: 1243 - DNA, 963 bp, synthetic construct
  misc_feature 1..963: note = variant of adenosine kinase from Xanthemonas campestris
  source 1..963: mol_type = other DNA
atgcaccatcatcaccatcacgggggctccggcatgagtgcactgatttgcggttctttagcgtatgataccatcatggtgtttccggaccagttcaagaaccatattctgcccgatcgtgttcaccgcctcaatgtcagctttcttgtaccacgcatgcgtcgtgaatttggaggctgtgccggcaacattgcgtacaatctgcatctgttgggtggtgctccgatcgtaatggctacggtgggccaagatttcggtccgtatcgcgagcacttcgaaactctgggcattgacttatcccgcgtcaagatcatcgatgatctgagtacaccgcaggccttcattaccaccgacatggatcataaccagattacggcgtttcacggcggcgcaatgatgcgttcgtacgaaaatcacgttcgtgatgtgccgggtgttaccttgggcctcgtaggtcctgatggacgcgagggcatgatccaaaatgccgaagaatttgctgctggtggcattccgttcatttttgacccaggtcaggcagtgccgctgttcaacggccccgaactgcgcgagtttatcgaacaggcggactatgtggtggtcaacgattacgaagcgaatcttcttcaagcccgtactggctggaacgagcaggacattgtttcacgcgtgcaggcgtatatcaccacgcaaggttcggctggagccctggtacatacaccggagaagacctacgatattccgccggctaaaacccgtcgtgtcgttgatccaactggttgcggcgacgcgtttcgcgccggcctgatctatggtattcagcataattatgattggttgaccattggccgcatgggaaacttaatgggtgcgctgaaagtggaacaccctggcacccaaaatcagcgtttcgattttgccgaattcaacgaccagttcaaacaatattttggctacgcgctc

SEQ ID NO: 1244 - protein, 321 aa, synthetic construct
  REGION 1..321: note = variant of adenosine kinase from Xanthemonas campestris
MHHHHHHGGSGMSALICGSLAYDTIMVFPDQFKNHILPDRVHRLNVSFLVPRMRREFGGCAGNIAYNLHLLGGAPIVMATVGQDFGPYREHFETLGIDLSRVKIIDDLSTPQAFITTDMDHNQITAFHGGAMMRSYENHVRDVPGVTLGLVGPDGREGMIQNAEEFAAGGIPFIFDPGQAVPLFNGPELREFIEQADYVVVNDYEANLLQARTGWNEQDIVSRVQAYITTQGSAGALVHTPEKTYDIPPAKTRRVVDPTGCGDAFRAGLIYGIQHNYDWLTIGRMGNLMGALKVEHPGTQNQRFDFAEFNDQFKQYFGYAL

SEQ ID NO: 1245 - DNA, 963 bp, synthetic construct
  misc_feature 1..963: note = variant of adenosine kinase from Xanthemonas campestris
  source 1..963: mol_type = other DNA
atgcaccatcatcaccatcacgggggctccggcatgagtgcactgatttgcggttctttagcgtatgataccatcatggtgtttccggaccagttcaagaaccatattctgcccgatcgtgttcaccgcctcaatgtcagctttcttgtaccacgcatgcgtcgtgaatttggaggctgtgccggcaacattgcgtacaatctgcatctgttgggtggtgctccgatcgtaatggctacggtgggccaagatttcggtccgtatcgcgagcacttcgaaactctgggcattgacttatcccgcgtcaagatcatcgatgatctgagtacaccgcaggccttcattaccaccgacatggatcataaccagattacggcgtttcacggcggcgcaatgatgcgttcgtacgaaaatcacgttcgtgatgtgccgggtgttaccttgggcctcgtaggtcctgatggacgcgagggcatgatccaaaatgccgaagaatttgctgctggtggcattccgttcatttttgacccaggtcaggcagtgccgctgttcaacggccccgaactgcgcgagtttatcgaacaggcggactatgtggtggtcaacgattacgaaagcaatcttcttcaagcccgtactggctggaacgtgcaggacattgtttcacgcgtgcaggcgtatatcaccacgcaaggttcggctggagccctggtacatacaccggagaagacctacgatattccgccggctaaaacccgtcgtgtcgttgatccaactggttgcggcgacgcgtttcgcgccggcctgatctatggtattcagcataattatgattggttgaccattggccgcatgggaaacttaatgggtgcgctgaaagtggaacaccctggcacccaaaatcagcgtttcgattttgccgaattcaacgaccagttcaaacaatattttggctacgcgctc

SEQ ID NO: 1246 - protein, 321 aa, synthetic construct
  REGION 1..321: note = variant of adenosine kinase from Xanthemonas campestris
MHHHHHHGGSGMSALICGSLAYDTIMVFPDQFKNHILPDRVHRLNVSFLVPRMRREFGGCAGNIAYNLHLLGGAPIVMATVGQDFGPYREHFETLGIDLSRVKIIDDLSTPQAFITTDMDHNQITAFHGGAMMRSYENHVRDVPGVTLGLVGPDGREGMIQNAEEFAAGGIPFIFDPGQAVPLFNGPELREFIEQADYVVVNDYESNLLQARTGWNVQDIVSRVQAYITTQGSAGALVHTPEKTYDIPPAKTRRVVDPTGCGDAFRAGLIYGIQHNYDWLTIGRMGNLMGALKVEHPGTQNQRFDFAEFNDQFKQYFGYAL

SEQ ID NO: 1247 - DNA, 963 bp, synthetic construct
  misc_feature 1..963: note = variant of adenosine kinase from Xanthemonas campestris
  source 1..963: mol_type = other DNA
atgcaccatcatcaccatcacgggggctccggcatgagtgcactgatttgcggttctttagcgtatgataccatcatggtgtttccggaccagttcaagaaccatattctgcccgatcgtgttcaccgcctcaatgtcagctttcttgtaccacgcatgcgtcgtgaatttggaggctgtgccggcaacattgcgtacaatctgcatctgttgggtggtgctccgatcgtaatggctacggtgggccaagatttcggtccgtatcgcgagcacttcgaaactctgggcattgacttatcccgcgtcaagatcatcgatgatctgagtacaccgcaggccttcattaccaccgacatggatcataaccagattacggcgtttcacggcggcgcaatgatgcgttcgtacgaaaatcacgttcgtgatgtgccgggtgttaccttgggcctcgtaggtcctgatggacgcgagggcatgatccaaaatgccgaagaatttgctgctggtggcattccgttcatttttgacccaggtcaggcagtgccgctgttcaacggccccgaactgcgcgagtttatcgaacaggcggactatgtggtggtcaacgattacgaaagcaatcttcttcaagcccgtactggctggaacgagcaggacattgtttcacgcgtgcaggcgtatatcaccacgcaaggttcggctggagccctggtacggacaccggagaagacctacgatattccgccggctaaaacccgtcgtgtcgttgatccaactggttgcggcgacgcgtttcgcgccggcctgatctatggtattcagcataattatgattggttgaccattggccgcatgggaaacttaatgggtgcgctgaaagtggaacaccctggcacccaaaatcagcgtttcgattttgccgaattcaacgaccagttcaaacaatattttggctacgcgctc

SEQ ID NO: 1248 - protein, 321 aa, synthetic construct
  REGION 1..321: note = variant of adenosine kinase from Xanthemonas campestris
MHHHHHHGGSGMSALICGSLAYDTIMVFPDQFKNHILPDRVHRLNVSFLVPRMRREFGGCAGNIAYNLHLLGGAPIVMATVGQDFGPYREHFETLGIDLSRVKIIDDLSTPQAFITTDMDHNQITAFHGGAMMRSYENHVRDVPGVTLGLVGPDGREGMIQNAEEFAAGGIPFIFDPGQAVPLFNGPELREFIEQADYVVVNDYESNLLQARTGWNEQDIVSRVQAYITTQGSAGALVRTPEKTYDIPPAKTRRVVDPTGCGDAFRAGLIYGIQHNYDWLTIGRMGNLMGALKVEHPGTQNQRFDFAEFNDQFKQYFGYAL

SEQ ID NO: 1249 - DNA, 963 bp, synthetic construct
  misc_feature 1..963: note = variant of adenosine kinase from Xanthemonas campestris
  source 1..963: mol_type = other DNA
atgcaccatcatcaccatcacgggggctccggcatgagtgcactgatttgcggttctttagcgtatgataccatcatggtgtttccggaccagttcaagaaccatattctgcccgatcgtgttcaccgcctcaatgtcagctttcttgtaccacgcatgcgtcgtgaatttggaggctgtgccggcaacattgcgtacaatctgcatctgttgggtggtgctccgatcgtaatggctacggtgggccaagatttcggtccgtatcgcgagcacttcgaaactctgggcattgacttatcccgcgtcaagatcatcgatgatctgagtacaccgcaggccttcattaccaccgacatggatcataaccagattacggcgtttcacggcggcgcaatgatgcgttcgtacgaaaatcacgttcgtgatgtgccgggtgttaccttgggcctcgtaggtcctgatggacgcgagggcatgatccaaaatgccgaagaatttgctgctggtggcattccgttcatttttgacccaggtcaggcagtgccgctgttcaacggccccgaactgcgcgagtttatcgaacaggcggactatgtggtggtcaacgattacgaaagcacgcttcttcaagcccgtactggctggaacgagcaggacattgtttcacgcgtgcaggcgtatatcaccacgcaaggttcggctggagccctggtacatacaccggagaagacctacgatattccgccggctaaaacccgtcgtgtcgttgatccaactggttgcggcgacgcgtttcgcgccggcctgatctatggtattcagcataattatgattggttgaccattggccgcatgggaaacttaatgggtgcgctgaaagtggaacaccctggcacccaaaatcagcgtttcgattttgccgaattcaacgaccagttcaaacaatattttggctacgcgctc

SEQ ID NO: 1250 - protein, 321 aa, synthetic construct
  REGION 1..321: note = variant of adenosine kinase from Xanthemonas campestris
MHHHHHHGGSGMSALICGSLAYDTIMVFPDQFKNHILPDRVHRLNVSFLVPRMRREFGGCAGNIAYNLHLLGGAPIVMATVGQDFGPYREHFETLGIDLSRVKIIDDLSTPQAFITTDMDHNQITAFHGGAMMRSYENHVRDVPGVTLGLVGPDGREGMIQNAEEFAAGGIPFIFDPGQAVPLFNGPELREFIEQADYVVVNDYESTLLQARTGWNEQDIVSRVQAYITTQGSAGALVHTPEKTYDIPPAKTRRVVDPTGCGDAFRAGLIYGIQHNYDWLTIGRMGNLMGALKVEHPGTQNQRFDFAEFNDQFKQYFGYAL

SEQ ID NO: 1251 - DNA, 963 bp, synthetic construct
  misc_feature 1..963: note = variant of adenosine kinase from Xanthemonas campestris
  source 1..963: mol_type = other DNA
atgcaccatcatcaccatcacgggggctccggcatggcggcactgatttgcggttctttagcgtatgataccatcatggtgtttccggaccagttcaagaaccatattctgcccgatcgtgttcaccgcctcaatgtcagctttcttgtaccacgcatgcgtcgtgaatttggaggctgtgccggcaacattgcgtacaatctgcatctgttgggtggtgctccgatcgtaatggctacggtgggccaagatttcggtccgtatcgcgagcacttcgaaactctgggcattgacttatcccgcgtcaagatcatcgatgatctgagtacaccgcaggccttcattaccaccgacatggatcataaccagattacggcgtttcacggcggcgcaatgatgcgttcgtacgaaaatcacgttcgtgatgtgccgggtgttaccttgggcctcgtaggtcctgatggacgcgagggcatgatccaaaatgccgaagaatttgctgctggtggcattccgttcatttttgacccaggtcaggcagtgccgctgttcaacggccccgaactgcgcgagtttatcgaacaggcggactatgtggtggtcaacgattacgaaagcaatcttcttcaagcccgtactggctggaacgagcaggacattgtttcacgcgtgcaggcgtatatcaccacgcaaggttcggctggagccctggtacatacaccggagaagacctacgatattccgccggctaaaacccgtcgtgtcgttgatccaactggttgcggcgacgcgtttcgcgccggcctgatctatggtattcagcataattatgattggttgaccattggccgcatgggaaacttaatgggtgcgctgaaagtggaacaccctggcacccaaaatcagcgtttcgattttgccgaattcaacgaccagttcaaacaatattttggctacgcgctc

SEQ ID NO: 1252 - protein, 321 aa, synthetic construct
  REGION 1..321: note = variant of adenosine kinase from Xanthemonas campestris
MHHHHHHGGSGMAALICGSLAYDTIMVFPDQFKNHILPDRVHRLNVSFLVPRMRREFGGCAGNIAYNLHLLGGAPIVMATVGQDFGPYREHFETLGIDLSRVKIIDDLSTPQAFITTDMDHNQITAFHGGAMMRSYENHVRDVPGVTLGLVGPDGREGMIQNAEEFAAGGIPFIFDPGQAVPLFNGPELREFIEQADYVVVNDYESNLLQARTGWNEQDIVSRVQAYITTQGSAGALVHTPEKTYDIPPAKTRRVVDPTGCGDAFRAGLIYGIQHNYDWLTIGRMGNLMGALKVEHPGTQNQRFDFAEFNDQFKQYFGYAL

SEQ ID NO: 1253 - DNA, 963 bp, synthetic construct
  misc_feature 1..963: note = variant of adenosine kinase from Xanthemonas campestris
  source 1..963: mol_type = other DNA
atgcaccatcatcaccatcacgggggctccggcatgagtgcactgatttgcggttctttagcgtatgataccatcatggtgtttccggaccagttcaagaaccatattctgcccgatcgtgttcaccgcctcaatgtcagctttcttgtaccacgcatgcgtcgtgaatttggaggctgtgccggcaacattgcgtacaatctgcatctgttgggtggtgctccgatcgtaatggctacggtgggccaagatttcggtccgtatcgcgagcacttcgaaactctgggcattgacttatcccgcgtcaagatcatcgatgatctgagtacaccgcaggccttcattaccaccgacatggatcataaccagattacggcgtttcacggcggcgcaatgatgcgttcgtacgaaaatcacgttcgtgatgtgccgggtgttaccttgggcctcgtaggtcctgatggacgcgagggcatgatccaaaatgccgaagaatttgctgctggtggcattccgttcatttttgacccaggtcaggcagtgccgctgttcaacggccccgaactgcgcgagtttatcgaacaggcggactatgtggtggtcaacgattacgaaagcaatcttcttcaagcccgtactggctggaacgagcaggacattgtttcacgcgtgcaggcgtatatcaccacgcaaggttcggctggagccctggtacatacaccggagaagacctacacgattccgccggctaaaacccgtcgtgtcgttgatccaactggttgcggcgacgcgtttcgcgccggcctgatctatggtattcagcataattatgattggttgaccattggccgcatgggaaacttaatgggtgcgctgaaagtggaacaccctggcacccaaaatcagcgtttcgattttgccgaattcaacgaccagttcaaacaatattttggctacgcgctc

SEQ ID NO: 1254 - protein, 321 aa, synthetic construct
  REGION 1..321: note = variant of adenosine kinase from Xanthemonas campestris
MHHHHHHGGSGMSALICGSLAYDTIMVFPDQFKNHILPDRVHRLNVSFLVPRMRREFGGCAGNIAYNLHLLGGAPIVMATVGQDFGPYREHFETLGIDLSRVKIIDDLSTPQAFITTDMDHNQITAFHGGAMMRSYENHVRDVPGVTLGLVGPDGREGMIQNAEEFAAGGIPFIFDPGQAVPLFNGPELREFIEQADYVVVNDYESNLLQARTGWNEQDIVSRVQAYITTQGSAGALVHTPEKTYTIPPAKTRRVVDPTGCGDAFRAGLIYGIQHNYDWLTIGRMGNLMGALKVEHPGTQNQRFDFAEFNDQFKQYFGYAL

SEQ ID NO: 1255 - DNA, 963 bp, synthetic construct
  misc_feature 1..963: note = variant of adenosine kinase from Xanthemonas campestris
  source 1..963: mol_type = other DNA
atgcaccatcatcaccatcacgggggctccggcatgccggcactgatttgcggttctttagcgtatgataccatcatggtgtttccggaccagttcaagaaccatattctgcccgatcgtgttcaccgcctcaatgtcagctttcttgtaccacgcatgcgtcgtgaatttggaggctgtgccggcaacattgcgtacaatctgcatctgttgggtggtgctccgatcgtaatggctacggtgggccaagatttcggtccgtatcgcgagcacttcgaaactctgggcattgacttatcccgcgtcaagatcatcgatgatctgagtacaccgcaggccttcattaccaccgacatggatcataaccagattacggcgtttcacggcggcgcaatgatgcgttcgtacgaaaatcacgttcgtgatgtgccgggtgttaccttgggcctcgtaggtcctgatggacgcgagggcatgatccaaaatgccgaagaatttgctgctggtggcattccgttcatttttgacccaggtcaggcagtgccgctgttcaacggccccgaactgcgcgagtttatcgaacaggcggactatgtggtggtcaacgattacgaaagcaatcttcttcaagcccgtactggctggaacgagcaggacattgtttcacgcgtgcaggcgtatatcaccacgcaaggttcggctggagccctggtacatacaccggagaagacctacgatattccgccggctaaaacccgtcgtgtcgttgatccaactggttgcggcgacgcgtttcgcgccggcctgatctatggtattcagcataattatgattggttgaccattggccgcatgggaaacttaatgggtgcgctgaaagtggaacaccctggcacccaaaatcagcgtttcgattttgccgaattcaacgaccagttcaaacaatattttggctacgcgctc

SEQ ID NO: 1256 - protein, 321 aa, synthetic construct
  REGION 1..321: note = variant of adenosine kinase from Xanthemonas campestris
MHHHHHHGGSGMPALICGSLAYDTIMVFPDQFKNHILPDRVHRLNVSFLVPRMRREFGGCAGNIAYNLHLLGGAPIVMATVGQDFGPYREHFETLGIDLSRVKIIDDLSTPQAFITTDMDHNQITAFHGGAMMRSYENHVRDVPGVTLGLVGPDGREGMIQNAEEFAAGGIPFIFDPGQAVPLFNGPELREFIEQADYVVVNDYESNLLQARTGWNEQDIVSRVQAYITTQGSAGALVHTPEKTYDIPPAKTRRVVDPTGCGDAFRAGLIYGIQHNYDWLTIGRMGNLMGALKVEHPGTQNQRFDFAEFNDQFKQYFGYAL

SEQ ID NO: 1257 - DNA, 963 bp, synthetic construct
  misc_feature 1..963: note = variant of adenosine kinase from Xanthemonas campestris
  source 1..963: mol_type = other DNA
atgcaccatcatcaccatcacgggggctccggcatgagtgcactgatttgcggttctttagcgtatgataccatcatggtgtttccggaccagttcaagaaccatattctgcccgatcgtgttcaccgcctcaatgtcagctttcttgtaccacgcatgcgtcgtgaatttggaggctgtgccggcaacattgcgtacaatctgcatctgttgggtggtgctccgatcgtaatggctacggtgggccaagatttcggtccgtatcgcgagcacttcgaaactctgggcattgacttatcccgcgtcaagatcatcgatgatctgagtacaccgcaggccttcattaccaccgacatggatcataaccagattacggcgtttcacggcggcgcaatgatgcgttcgtacgaaaatcacgttcgtgatgtgccgggtgttaccttgggcctcgtaggtcctgatggacgcgagggcatgatccaaaatgccgaagaatttgctgctggtggcattccgttcatttttgacccaggtcaggcagtgccgctgttcaacggccccgaactgcgcgagtttatcgaacaggcggactatgtggtggtcaacgattacgaaagcatgcttcttcaagcccgtactggctggaacgagcaggacattgtttcacgcgtgcaggcgtatatcaccacgcaaggttcggctggagccctggtacatacaccggagaagacctacgatattccgccggctaaaacccgtcgtgtcgttgatccaactggttgcggcgacgcgtttcgcgccggcctgatctatggtattcagcataattatgattggttgaccattggccgcatgggaaacttaatgggtgcgctgaaagtggaacaccctggcacccaaaatcagcgtttcgattttgccgaattcaacgaccagttcaaacaatattttggctacgcgctc

SEQ ID NO: 1258 - protein, 321 aa, synthetic construct
  REGION 1..321: note = variant of adenosine kinase from Xanthemonas campestris
MHHHHHHGGSGMSALICGSLAYDTIMVFPDQFKNHILPDRVHRLNVSFLVPRMRREFGGCAGNIAYNLHLLGGAPIVMATVGQDFGPYREHFETLGIDLSRVKIIDDLSTPQAFITTDMDHNQITAFHGGAMMRSYENHVRDVPGVTLGLVGPDGREGMIQNAEEFAAGGIPFIFDPGQAVPLFNGPELREFIEQADYVVVNDYESMLLQARTGWNEQDIVSRVQAYITTQGSAGALVHTPEKTYDIPPAKTRRVVDPTGCGDAFRAGLIYGIQHNYDWLTIGRMGNLMGALKVEHPGTQNQRFDFAEFNDQFKQYFGYAL

SEQ ID NO: 1259 - DNA, 963 bp, synthetic construct
  misc_feature 1..963: note = variant of adenosine kinase from Xanthemonas campestris
  source 1..963: mol_type = other DNA
atgcaccatcatcaccatcacgggggctccggcatgagtgcactgatttgcggttctttagcgtatgataccatcatggtgtttccggaccagttcaagaaccatattctgcccgatcgtgttcaccgcctcaatgtcagctttcttgtaccacgcatgcgtcgtgaatttggaggctgtgccggcaacattgcgtacaatctgcatctgttgggtggtgctccgatcgtaatggctacggtgggccaagatttcggtccgtatcgcgagcacttcgaaactctgggcattgacttatcccgcgtcaagatcatcgatgatctgagtacaccgcaggccttcattaccaccgacatggatcataaccagattacggcgtttcacggcggcgcaatgatgcgttcgtacgaaaatcacgttcgtgatgtgccgggtgttaccttgggcctcgtaggtcctgatggacgcgagggcatgatccaatttgccgaagaatttgctgctggtggcattccgttcatttttgacccaggtcaggcagtgccgctgttcaacggccccgaactgcgcgagtttatcgaacaggcggactatgtggtggtcaacgattacgaaagcaatcttcttcaagcccgtactggctggaacgagcaggacattgtttcacgcgtgcaggcgtatatcaccacgcaaggttcggctggagccctggtacatacaccggagaagacctacgatattccgccggctaaaacccgtcgtgtcgttgatccaactggttgcggcgacgcgtttcgcgccggcctgatctatggtattcagcataattatgattggttgaccattggccgcatgggaaacttaatgggtgcgctgaaagtggaacaccctggcacccaaaatcagcgtttcgattttgccgaattcaacgaccagttcaaacaatattttggctacgcgctc

SEQ ID NO: 1260 - protein, 321 aa, synthetic construct
  REGION 1..321: note = variant of adenosine kinase from Xanthemonas campestris
MHHHHHHGGSGMSALICGSLAYDTIMVFPDQFKNHILPDRVHRLNVSFLVPRMRREFGGCAGNIAYNLHLLGGAPIVMATVGQDFGPYREHFETLGIDLSRVKIIDDLSTPQAFITTDMDHNQITAFHGGAMMRSYENHVRDVPGVTLGLVGPDGREGMIQFAEEFAAGGIPFIFDPGQAVPLFNGPELREFIEQADYVVVNDYESNLLQARTGWNEQDIVSRVQAYITTQGSAGALVHTPEKTYDIPPAKTRRVVDPTGCGDAFRAGLIYGIQHNYDWLTIGRMGNLMGALKVEHPGTQNQRFDFAEFNDQFKQYFGYAL

SEQ ID NO: 1261 - DNA, 963 bp, synthetic construct
  misc_feature 1..963: note = variant of adenosine kinase from Xanthemonas campestris
  source 1..963: mol_type = other DNA
atgcaccatcatcaccatcacgggggctccggcatgagtgcactgatttgcggttctttagcgtatgataccatcatggtgtttccggaccagttcaagaaccatattctgcccgatcgtgttcaccgcctcaatgtcagctttcttgtaccacgcatgcgtcgtgaatttggaggctgtgccggcaacattgcgtacaatctgcatctgttgggtggtgctccgatcgtaatggctacggtgggccaagatttcggtccgtatcgcgagcacttcgaaactctgggcattgacttatcccgcgtcaagatcatcgatgatctgagtacaccgcaggccttcattaccaccgacatggatcataaccagattacggcgtttcacggcggcgcaatgatgcgttcgtacgaaaatcacgttcgtgatgtgccgggtgttaccttgggcctcgtaggtcctgatggacgcgagggcatgatccaaaatgccgaagaatttgctgctggtggcattccgttcatttttgacccaggtcaggcagtgccgctgttcaacggccccgaactgcgcgagtttatcgaacaggcggactatgtggtggtcaacgattacgaaagcttgcttcttcaagcccgtactggctggaacgagcaggacattgtttcacgcgtgcaggcgtatatcaccacgcaaggttcggctggagccctggtacatacaccggagaagacctacgatattccgccggctaaaacccgtcgtgtcgttgatccaactggttgcggcgacgcgtttcgcgccggcctgatctatggtattcagcataattatgattggttgaccattggccgcatgggaaacttaatgggtgcgctgaaagtggaacaccctggcacccaaaatcagcgtttcgattttgccgaattcaacgaccagttcaaacaatattttggctacgcgctc

SEQ ID NO: 1262 - protein, 321 aa, synthetic construct
  REGION 1..321: note = variant of adenosine kinase from Xanthemonas campestris
MHHHHHHGGSGMSALICGSLAYDTIMVFPDQFKNHILPDRVHRLNVSFLVPRMRREFGGCAGNIAYNLHLLGGAPIVMATVGQDFGPYREHFETLGIDLSRVKIIDDLSTPQAFITTDMDHNQITAFHGGAMMRSYENHVRDVPGVTLGLVGPDGREGMIQNAEEFAAGGIPFIFDPGQAVPLFNGPELREFIEQADYVVVNDYESLLLQARTGWNEQDIVSRVQAYITTQGSAGALVHTPEKTYDIPPAKTRRVVDPTGCGDAFRAGLIYGIQHNYDWLTIGRMGNLMGALKVEHPGTQNQRFDFAEFNDQFKQYFGYAL

SEQ ID NO: 1263 - DNA, 963 bp, synthetic construct
  misc_feature 1..963: note = variant of adenosine kinase from Xanthemonas campestris
  source 1..963: mol_type = other DNA
atgcaccatcatcaccatcacgggggctccggcatgagtgcactgatttgcggttctttagcgtatgataccatcatgccgtttccggaccagttcaagaaccatattctgcccgatcgtgttcaccgcctcaatgtcagctttcttgtaccacgcatgcgtcgtgaatttggaggctgtgccggcaacattgcgtacaatctgcatctgttgggtggtgctccgatcgtaatggctacggtgggccaagatttcggtccgtatcgcgagcacttcgaaactctgggcattgacttatcccgcgtcaagatcatcgatgatctgagtacaccgcaggccttcattaccaccgacatggatcataaccagattacggcgtttcacggcggcgcaatgatgcgttcgtacgaaaatcacgttcgtgatgtgccgggtgttaccttgggcctcgtaggtcctgatggacgcgagggcatgatccaaaatgccgaagaatttgctgctggtggcattccgttcatttttgacccaggtcaggcagtgccgctgttcaacggccccgaactgcgcgagtttatcgaacaggcggactatgtggtggtcaacgattacgaaagcaatcttcttcaagcccgtactggctggaacgagcaggacattgtttcacgcgtgcaggcgtatatcaccacgcaaggttcggctggagccctggtacatacaccggagaagacctacgatattccgccggctaaaacccgtcgtgtcgttgatccaactggttgcggcgacgcgtttcgcgccggcctgatctatggtattcagcataattatgattggttgaccattggccgcatgggaaacttaatgggtgcgctgaaagtggaacaccctggcacccaaaatcagcgtttcgattttgccgaattcaacgaccagttcaaacaatattttggctacgcgctc

SEQ ID NO: 1264 - protein, 321 aa, synthetic construct
  REGION 1..321: note = variant of adenosine kinase from Xanthemonas campestris
MHHHHHHGGSGMSALICGSLAYDTIMPFPDQFKNHILPDRVHRLNVSFLVPRMRREFGGCAGNIAYNLHLLGGAPIVMATVGQDFGPYREHFETLGIDLSRVKIIDDLSTPQAFITTDMDHNQITAFHGGAMMRSYENHVRDVPGVTLGLVGPDGREGMIQNAEEFAAGGIPFIFDPGQAVPLFNGPELREFIEQADYVVVNDYESNLLQARTGWNEQDIVSRVQAYITTQGSAGALVHTPEKTYDIPPAKTRRVVDPTGCGDAFRAGLIYGIQHNYDWLTIGRMGNLMGALKVEHPGTQNQRFDFAEFNDQFKQYFGYAL

SEQ ID NO: 1265 - DNA, 963 bp, synthetic construct
  misc_feature 1..963: note = variant of adenosine kinase from Xanthemonas campestris
  source 1..963: mol_type = other DNA
atgcaccatcatcaccatcacgggggctccggcatgagtgcactgatttgcggttctttagcgtatgataccatcatggtgtttccggaccagttcaagaaccatattctgcccgatcgtgttcaccgcctcaatgtcagctttcttgtaccacgcatgcgtcgtgaatttggaggctgtgccggcaacattgcgtacaatctgcatctgttgggtggtgctccgatcgtaatggctacggtgggccaagatttcggtccgtatcgcgagcacttcgaaactctgggcattgacttatcccgcgtcaagatcatcgatgattgtagtacaccgcaggccttcattaccaccgacatggatcataaccagattacggcgtttcacggcggcgcaatgatgcgttcgtacgaaaatcacgttcgtgatgtgccgggtgttaccttgggcctcgtaggtcctgatggacgcgagggcatgatccaaaatgccgaagaatttgctgctggtggcattccgttcatttttgacccaggtcaggcagtgccgctgttcaacggccccgaactgcgcgagtttatcgaacaggcggactatgtggtggtcaacgattacgaaagcaatcttcttcaagcccgtactggctggaacgagcaggacattgtttcacgcgtgcaggcgtatatcaccacgcaaggttcggctggagccctggtacatacaccggagaagacctacgatattccgccggctaaaacccgtcgtgtcgttgatccaactggttgcggcgacgcgtttcgcgccggcctgatctatggtattcagcataattatgattggttgaccattggccgcatgggaaacttaatgggtgcgctgaaagtggaacaccctggcacccaaaatcagcgtttcgattttgccgaattcaacgaccagttcaaacaatattttggctacgcgctc

SEQ ID NO: 1266 - protein, 321 aa, synthetic construct
  REGION 1..321: note = variant of adenosine kinase from Xanthemonas campestris
MHHHHHHGGSGMSALICGSLAYDTIMVFPDQFKNHILPDRVHRLNVSFLVPRMRREFGGCAGNIAYNLHLLGGAPIVMATVGQDFGPYREHFETLGIDLSRVKIIDDCSTPQAFITTDMDHNQITAFHGGAMMRSYENHVRDVPGVTLGLVGPDGREGMIQNAEEFAAGGIPFIFDPGQAVPLFNGPELREFIEQADYVVVNDYESNLLQARTGWNEQDIVSRVQAYITTQGSAGALVHTPEKTYDIPPAKTRRVVDPTGCGDAFRAGLIYGIQHNYDWLTIGRMGNLMGALKVEHPGTQNQRFDFAEFNDQFKQYFGYAL

SEQ ID NO: 1267 - DNA, 963 bp, synthetic construct
  misc_feature 1..963: note = variant of adenosine kinase from Xanthemonas campestris
  source 1..963: mol_type = other DNA
atgcaccatcatcaccatcacgggggctccggcatgagtgcactgatttgcggttctttagcgtatgataccatcatggtgtttccggaccagttcaagaaccatattctgcccgatcgtgttcaccgcctcaatgtcagctttcttgtaccacgcatgcgtcgtgaatttggaggctgtgccggcaacattgcgtacaatctgcatctgttgggtggtgctccgatcgtaatggctacggtgggccaagatttcggtccgtatcgcgagcacttcgaaactctgggcattgacttatcccgcgtcaagatcatcgatgatctgagtacaccgcaggccttcattaccaccgacatggatcataaccagattacggcgtttcacggcggcgcaatgatgcgttcgtacgaaaatcacgttcgtgatgtgccgggtgttaccttgggcctcgtaggtcctgatggacgcgagggcatgctgcaaaatgccgaagaatttgctgctggtggcattccgttcatttttgacccaggtcaggcagtgccgctgttcaacggccccgaactgcgcgagtttatcgaacaggcggactatgtggtggtcaacgattacgaaagcaatcttcttcaagcccgtactggctggaacgagcaggacattgtttcacgcgtgcaggcgtatatcaccacgcaaggttcggctggagccctggtacatacaccggagaagacctacgatattccgccggctaaaacccgtcgtgtcgttgatccaactggttgcggcgacgcgtttcgcgccggcctgatctatggtattcagcataattatgattggttgaccattggccgcatgggaaacttaatgggtgcgctgaaagtggaacaccctggcacccaaaatcagcgtttcgattttgccgaattcaacgaccagttcaaacaatattttggctacgcgctc

SEQ ID NO: 1268 - protein, 321 aa, synthetic construct
  REGION 1..321: note = variant of adenosine kinase from Xanthemonas campestris
MHHHHHHGGSGMSALICGSLAYDTIMVFPDQFKNHILPDRVHRLNVSFLVPRMRREFGGCAGNIAYNLHLLGGAPIVMATVGQDFGPYREHFETLGIDLSRVKIIDDLSTPQAFITTDMDHNQITAFHGGAMMRSYENHVRDVPGVTLGLVGPDGREGMLQNAEEFAAGGIPFIFDPGQAVPLFNGPELREFIEQADYVVVNDYESNLLQARTGWNEQDIVSRVQAYITTQGSAGALVHTPEKTYDIPPAKTRRVVDPTGCGDAFRAGLIYGIQHNYDWLTIGRMGNLMGALKVEHPGTQNQRFDFAEFNDQFKQYFGYAL

SEQ ID NO: 1269 - DNA, 963 bp, synthetic construct
  misc_feature 1..963: note = variant of adenosine kinase from Xanthemonas campestris
  source 1..963: mol_type = other DNA
atgcaccatcatcaccatcacgggggctccggcatgagtgcactgatttgcggttctttagcgtatgataccatcatggtgtttccggaccagttctcgaaccatattctgcccgatcgtgttcaccgcctcaatgtcagctttcttgtaccacgcatgcgtcgtgaatttggaggctgtgccggcaacattgcgtacaatctgcatctgttgggtggtgctccgatcgtaatggctacggtgggccaagatttcggtccgtatcgcgagcacttcgaaactctgggcattgacttatcccgcgtcaagatcatcgatgatctgagtacaccgcaggccttcattaccaccgacatggatcataaccagattacggcgtttcacggcggcgcaatgatgcgttcgtacgaaaatcacgttcgtgatgtgccgggtgttaccttgggcctcgtaggtcctgatggacgcgagggcatgatccaaaatgccgaagaatttgctgctggtggcattccgttcatttttgacccaggtcaggcagtgccgctgttcaacggccccgaactgcgcgagtttatcgaacaggcggactatgtggtggtcaacgattacgaaagcaatcttcttcaagcccgtactggctggaacgagcaggacattgtttcacgcgtgcaggcgtatatcaccacgcaaggttcggctggagccctggtacatacaccggagaagacctacgatattccgccggctaaaacccgtcgtgtcgttgatccaactggttgcggcgacgcgtttcgcgccggcctgatctatggtattcagcataattatgattggttgaccattggccgcatgggaaacttaatgggtgcgctgaaagtggaacaccctggcacccaaaatcagcgtttcgattttgccgaattcaacgaccagttcaaacaatattttggctacgcgctc

SEQ ID NO: 1270 - protein, 321 aa, synthetic construct
  REGION 1..321: note = variant of adenosine kinase from Xanthemonas campestris
MHHHHHHGGSGMSALICGSLAYDTIMVFPDQFSNHILPDRVHRLNVSFLVPRMRREFGGCAGNIAYNLHLLGGAPIVMATVGQDFGPYREHFETLGIDLSRVKIIDDLSTPQAFITTDMDHNQITAFHGGAMMRSYENHVRDVPGVTLGLVGPDGREGMIQNAEEFAAGGIPFIFDPGQAVPLFNGPELREFIEQADYVVVNDYESNLLQARTGWNEQDIVSRVQAYITTQGSAGALVHTPEKTYDIPPAKTRRVVDPTGCGDAFRAGLIYGIQHNYDWLTIGRMGNLMGALKVEHPGTQNQRFDFAEFNDQFKQYFGYAL

SEQ ID NO: 1271 - DNA, 963 bp, synthetic construct
  misc_feature 1..963: note = variant of adenosine kinase from Xanthemonas campestris
  source 1..963: mol_type = other DNA
atgcaccatcatcaccatcacgggggctccggcatgagtgcactgatttgcggttctttagcgtatgataccatcatggtgtttccggaccagttcaagaaccatattctgcccgatcgtgttcaccgcctcaatgtcagctttcttgtaccacgcatgcgtcgtgaatttggaggctgtgccggcaacattgcgtacaatctgcatctgttgggtggtgctccgatcgtaatggctacggtgggccaagatttcggtccgtatcgcgagcacttcgaaactctgggcattgacttatcccgcgtcaagatcatcgatgatctgagtacaccgcaggccttcattaccaccgacatggatcataaccagattacggcgtttcacggcggcgcaatgatgcgttcgtacgaaaatcacgttcgtgatgtgccgggtgttaccttgggcctcgtaggtcctgatggacgcgagggcatgatccaaaatgccgaagaatttgctgctggtggcattccgttcatttttgacccaggtcaggcagtgccgctgttcaacggccccgaactgcgcgagtttatcgaacaggcggactatgtggtggtcaacgattacgaaagcaatcttcttcaagcccgtactggctggaacgagcaggacattgtttcacgcgtgcaggcgtatatcaccacgcaaggttcggctggagccctggtacatacaccggagaagacctgggatattccgccggctaaaacccgtcgtgtcgttgatccaactggttgcggcgacgcgtttcgcgccggcctgatctatggtattcagcataattatgattggttgaccattggccgcatgggaaacttaatgggtgcgctgaaagtggaacaccctggcacccaaaatcagcgtttcgattttgccgaattcaacgaccagttcaaacaatattttggctacgcgctc

SEQ ID NO: 1272 - protein, 321 aa, synthetic construct
  REGION 1..321: note = variant of adenosine kinase from Xanthemonas campestris
MHHHHHHGGSGMSALICGSLAYDTIMVFPDQFKNHILPDRVHRLNVSFLVPRMRREFGGCAGNIAYNLHLLGGAPIVMATVGQDFGPYREHFETLGIDLSRVKIIDDLSTPQAFITTDMDHNQITAFHGGAMMRSYENHVRDVPGVTLGLVGPDGREGMIQNAEEFAAGGIPFIFDPGQAVPLFNGPELREFIEQADYVVVNDYESNLLQARTGWNEQDIVSRVQAYITTQGSAGALVHTPEKTWDIPPAKTRRVVDPTGCGDAFRAGLIYGIQHNYDWLTIGRMGNLMGALKVEHPGTQNQRFDFAEFNDQFKQYFGYAL

SEQ ID NO: 1273 - DNA, 963 bp, synthetic construct
  misc_feature 1..963: note = variant of adenosine kinase from Xanthemonas campestris
  source 1..963: mol_type = other DNA
atgcaccatcatcaccatcacgggggctccggcatgagtgcactgatttgcggttctttagcgtatgataccatcatggtgtttccggaccagttcaagaaccatattctgcccgatcgtgttcaccgcctcaatgtcagctttcttgtaccacgcatgcgtcgtgaatttggaggctgtgccggcaacattgcgtacaatctgcatctgttgggtggtgctccgatcgtaatggctacggtgggccaagatttcggtccgtatcgcgagcacttcgaaactctgggcattgacttatcccgcgtcaagatcatcgatgatctgagtacaccgcaggccttcattaccaccgacatggatcataaccagattacggcgtttcacggcggcgcaatgatgcgttcgtacgaaaatcacgttcgtgatgtgccgggtgttaccttgggcctcgtaggtcctgatggacgcgagggcatgatccaaaatgccgaagaatttgctgctggtggcattccgttcatttttgacccaggtcaggcagtgccgctgttcaacggccccgaactgcgcgagtttatcgaacaggcggactatgtggtggtcaacgattacgaaagcaatcttcttcaagcccgtactggctggaacgagcaggacattgtttcacgcgtgcaggcgtatatcaccacgcaaggttcggctggagccctggtatttacaccggagaagacctacgatattccgccggctaaaacccgtcgtgtcgttgatccaactggttgcggcgacgcgtttcgcgccggcctgatctatggtattcagcataattatgattggttgaccattggccgcatgggaaacttaatgggtgcgctgaaagtggaacaccctggcacccaaaatcagcgtttcgattttgccgaattcaacgaccagttcaaacaatattttggctacgcgctc

SEQ ID NO: 1274 - protein, 321 aa, synthetic construct
  REGION 1..321: note = variant of adenosine kinase from Xanthemonas campestris
MHHHHHHGGSGMSALICGSLAYDTIMVFPDQFKNHILPDRVHRLNVSFLVPRMRREFGGCAGNIAYNLHLLGGAPIVMATVGQDFGPYREHFETLGIDLSRVKIIDDLSTPQAFITTDMDHNQITAFHGGAMMRSYENHVRDVPGVTLGLVGPDGREGMIQNAEEFAAGGIPFIFDPGQAVPLFNGPELREFIEQADYVVVNDYESNLLQARTGWNEQDIVSRVQAYITTQGSAGALVFTPEKTYDIPPAKTRRVVDPTGCGDAFRAGLIYGIQHNYDWLTIGRMGNLMGALKVEHPGTQNQRFDFAEFNDQFKQYFGYAL

SEQ ID NO: 1275 - DNA, 963 bp, synthetic construct
  misc_feature 1..963: note = variant of adenosine kinase from Xanthemonas campestris
  source 1..963: mol_type = other DNA
atgcaccatcatcaccatcacgggggctccggcatgagtgcactgatttgcggttctttagcgtatgataccatcatggtgtttccggaccagttcaagaaccatattctgcccgatcgtgttcaccgcctcaatgtcagctttcttgtaccacgcatgcgtcgtgaatttggaggctgtgccggcaacattgcgtacaatctgcatctgttgggtggtgctccgatcgtaatggctacggtgggccaagatttcggtccgtatcgcgagcacatggaaactctgggcattgacttatcccgcgtcaagatcatcgatgatctgagtacaccgcaggccttcattaccaccgacatggatcataaccagattacggcgtttcacggcggcgcaatgatgcgttcgtacgaaaatcacgttcgtgatgtgccgggtgttaccttgggcctcgtaggtcctgatggacgcgagggcatgatccaaaatgccgaagaatttgctgctggtggcattccgttcatttttgacccaggtcaggcagtgccgctgttcaacggccccgaactgcgcgagtttatcgaacaggcggactatgtggtggtcaacgattacgaaagcaatcttcttcaagcccgtactggctggaacgagcaggacattgtttcacgcgtgcaggcgtatatcaccacgcaaggttcggctggagccctggtacatacaccggagaagacctacgatattccgccggctaaaacccgtcgtgtcgttgatccaactggttgcggcgacgcgtttcgcgccggcctgatctatggtattcagcataattatgattggttgaccattggccgcatgggaaacttaatgggtgcgctgaaagtggaacaccctggcacccaaaatcagcgtttcgattttgccgaattcaacgaccagttcaaacaatattttggctacgcgctc

SEQ ID NO: 1276 - protein, 321 aa, synthetic construct
  REGION 1..321: note = variant of adenosine kinase from Xanthemonas campestris
MHHHHHHGGSGMSALICGSLAYDTIMVFPDQFKNHILPDRVHRLNVSFLVPRMRREFGGCAGNIAYNLHLLGGAPIVMATVGQDFGPYREHMETLGIDLSRVKIIDDLSTPQAFITTDMDHNQITAFHGGAMMRSYENHVRDVPGVTLGLVGPDGREGMIQNAEEFAAGGIPFIFDPGQAVPLFNGPELREFIEQADYVVVNDYESNLLQARTGWNEQDIVSRVQAYITTQGSAGALVHTPEKTYDIPPAKTRRVVDPTGCGDAFRAGLIYGIQHNYDWLTIGRMGNLMGALKVEHPGTQNQRFDFAEFNDQFKQYFGYAL

SEQ ID NO: 1277 - DNA, 963 bp, synthetic construct
  misc_feature 1..963: note = variant of adenosine kinase from Xanthemonas campestris
  source 1..963: mol_type = other DNA
atgcaccatcatcaccatcacgggggctccggcatgagtgcactgatttgcggttctttagcgtatgataccatcatggtgtttccggaccagttcaagaaccatattctgcccgatcgtgttcaccgcctcaatgtcagctttcttgtaccacgcatgcgtcgtgaatttggaggctgtgccggcaacattgcgtacaatctgcatctgttgggtggtgctccgatcgtaatggctacggtgggccaagatttcggtccgtatcgcgagcacttcgaaactctgggcattgacttatcccgcgtcaagatcatcgatgatctgagtacaccgcaggccttcattaccaccgacatggatcataaccagattacggcgtttcacggcggcgcaatgatgcgttcgtacgaaaatcacgttcgtgatgtgccgggtgttaccttgggcctcgtaggtcctgatggacgcgagggcatgatccaaaatggggaagaatttgctgctggtggcattccgttcatttttgacccaggtcaggcagtgccgctgttcaacggccccgaactgcgcgagtttatcgaacaggcggactatgtggtggtcaacgattacgaaagcaatcttcttcaagcccgtactggctggaacgagcaggacattgtttcacgcgtgcaggcgtatatcaccacgcaaggttcggctggagccctggtacatacaccggagaagacctacgatattccgccggctaaaacccgtcgtgtcgttgatccaactggttgcggcgacgcgtttcgcgccggcctgatctatggtattcagcataattatgattggttgaccattggccgcatgggaaacttaatgggtgcgctgaaagtggaacaccctggcacccaaaatcagcgtttcgattttgccgaattcaacgaccagttcaaacaatattttggctacgcgctc

SEQ ID NO: 1278 - protein, 321 aa, synthetic construct
  REGION 1..321: note = variant of adenosine kinase from Xanthemonas campestris
MHHHHHHGGSGMSALICGSLAYDTIMVFPDQFKNHILPDRVHRLNVSFLVPRMRREFGGCAGNIAYNLHLLGGAPIVMATVGQDFGPYREHFETLGIDLSRVKIIDDLSTPQAFITTDMDHNQITAFHGGAMMRSYENHVRDVPGVTLGLVGPDGREGMIQNGEEFAAGGIPFIFDPGQAVPLFNGPELREFIEQADYVVVNDYESNLLQARTGWNEQDIVSRVQAYITTQGSAGALVHTPEKTYDIPPAKTRRVVDPTGCGDAFRAGLIYGIQHNYDWLTIGRMGNLMGALKVEHPGTQNQRFDFAEFNDQFKQYFGYAL

SEQ ID NO: 1279 - DNA, 963 bp, synthetic construct
  misc_feature 1..963: note = variant of adenosine kinase from Xanthemonas campestris
  source 1..963: mol_type = other DNA
atgcaccatcatcaccatcacgggggctccggcatgagtgcactgatttgcggttctttagcgtatgataccatcatggtgtttccggaccagttcaagaaccatattctgcccgatcgtgttcaccgcctcaatgtcagctttcttgtaccacgcatgcgtcgtgaatttggaggctgtgccggcaacattgcgtacaatctgcatctgttgggtggtgctccgatcgtaatggctacggtgggccaagatttcggtccgtatcgcgagcacttcgaaactctgggcattgacttatcccgcgtcaagatcatcgatgatctgagtacaccgcaggccttcattaccaccgacatggatcataaccagattacggcgtttcacggcggcgcaatgatgcgttcgtacgaaaatcacgttcgtgatgtgccgggtgttaccttgggcctcgtaggtcctgatggacgcgagggcatgatccaaaatgccgaagaatttgctgctggtggcattccgttcatttttgacccaggtcaggcagtgccgctgttcaacggccccgaactgcgcgagtttatcgaacaggcggactatgtggtggtcaacgattacgaaagcaatcttcttcaagcccgtactggctggaacgagcaggacattgtttcacgagtgcaggcgtatatcaccacgcaaggttcggctggagccctggtaactacaccggagaagacctacgatattccgccggctaaaacccgtcgtgtcgttgatccaactggttgcggcgacgcgtttcgcgccggcctgatctatggtattcagcataattatgattggttgaccattggccgcatgggaaacttaatgggtgcgctgaaagtggaacaccctggcacccaaaatcagcgtttcgattttgccgaattcaacgaccagttcaaacaatattttggctacgcgctc

SEQ ID NO: 1280 - protein, 321 aa, synthetic construct
  REGION 1..321: note = variant of adenosine kinase from Xanthemonas campestris
MHHHHHHGGSGMSALICGSLAYDTIMVFPDQFKNHILPDRVHRLNVSFLVPRMRREFGGCAGNIAYNLHLLGGAPIVMATVGQDFGPYREHFETLGIDLSRVKIIDDLSTPQAFITTDMDHNQITAFHGGAMMRSYENHVRDVPGVTLGLVGPDGREGMIQNAEEFAAGGIPFIFDPGQAVPLFNGPELREFIEQADYVVVNDYESNLLQARTGWNEQDIVSRVQAYITTQGSAGALVTTPEKTYDIPPAKTRRVVDPTGCGDAFRAGLIYGIQHNYDWLTIGRMGNLMGALKVEHPGTQNQRFDFAEFNDQFKQYFGYAL

SEQ ID NO: 1281 - DNA, 963 bp, synthetic construct
  misc_feature 1..963: note = variant of adenosine kinase from Xanthemonas campestris
  source 1..963: mol_type = other DNA
atgcaccatcatcaccatcacgggggctccggcatgagtgcactgatttgcggttctttagcgtatgataccatcatggtgtttccggaccagttcaagaaccatattctgcccgatcgtgttcaccgcctcaatgtcagctttcttgtaccacgcatgcgtcgtgaatttggaggctgtgccggcaacattgcgtacaatctgcatctgttgggtggtgctccgatcgtaatggctacggtgggccaagatttcggtccgtatcgcgagcacttcgaaactctgggcattgacttatcccgcgtcaagtgtatcgatgatctgagtacaccgcaggccttcattaccaccgacatggatcataaccagattacggcgtttcacggcggcgcaatgatgcgttcgtacgaaaatcacgttcgtgatgtgccgggtgttaccttgggcctcgtaggtcctgatggacgcgagggcatgatccaaaatgccgaagaatttgctgctggtggcattccgttcatttttgacccaggtcaggcagtgccgctgttcaacggccccgaactgcgcgagtttatcgaacaggcggactatgtggtggtcaacgattacgaaagcaatcttcttcaagcccgtactggctggaacgagcaggacattgtttcacgcgtgcaggcgtatatcaccacgcaaggttcggctggagccctggtacatacaccggagaagacctacgatattccgccggctaaaacccgtcgtgtcgttgatccaactggttgcggcgacgcgtttcgcgccggcctgatctatggtattcagcataattatgattggttgaccattggccgcatgggaaacttaatgggtgcgctgaaagtggaacaccctggcacccaaaatcagcgtttcgattttgccgaattcaacgaccagttcaaacaatattttggctacgcgctc

SEQ ID NO: 1282 - protein, 321 aa, synthetic construct
  REGION 1..321: note = variant of adenosine kinase from Xanthemonas campestris
MHHHHHHGGSGMSALICGSLAYDTIMVFPDQFKNHILPDRVHRLNVSFLVPRMRREFGGCAGNIAYNLHLLGGAPIVMATVGQDFGPYREHFETLGIDLSRVKCIDDLSTPQAFITTDMDHNQITAFHGGAMMRSYENHVRDVPGVTLGLVGPDGREGMIQNAEEFAAGGIPFIFDPGQAVPLFNGPELREFIEQADYVVVNDYESNLLQARTGWNEQDIVSRVQAYITTQGSAGALVHTPEKTYDIPPAKTRRVVDPTGCGDAFRAGLIYGIQHNYDWLTIGRMGNLMGALKVEHPGTQNQRFDFAEFNDQFKQYFGYAL

SEQ ID NO: 1283 - DNA, 963 bp, synthetic construct
  misc_feature 1..963: note = variant of adenosine kinase from Xanthemonas campestris
  source 1..963: mol_type = other DNA
atgcaccatcatcaccatcacgggggctccggcatgagtgcactgatttgcggttctttagcgtatgataccatcatggtgtttccggaccagttcaagaaccatattctgcccgatcgtgttcaccgcctcaatgtcagctttcttgtaccacgcatgcgtcgtgaatttggaggctgtgccggcaacattgcgtacaatctgcatctgttgggtggtgctccgatcgtaatggctacggtgggccaagatttcggtccgtatcgcgagcacttcgaaactctgggcattgacttatcccgcgtcaagatcatcgatgatctgagtacaccgcaggccttcattaccaccgacatggatcataaccagattacggcgtttcacggcggcgcaatgatgcgttcgtacgaaaatcacgttcgtgatgtgccgggtgttaccttgggcctcgtaggtcctgatggacgcccgggcatgatccaaaatgccgaagaatttgctgctggtggcattccgttcatttttgacccaggtcaggcagtgccgctgttcaacggccccgaactgcgcgagtttatcgaacaggcggactatgtggtggtcaacgattacgaaagcaatcttcttcaagcccgtactggctggaacgagcaggacattgtttcacgcgtgcaggcgtatatcaccacgcaaggttcggctggagccctggtacatacaccggagaagacctacgatattccgccggctaaaacccgtcgtgtcgttgatccaactggttgcggcgacgcgtttcgcgccggcctgatctatggtattcagcataattatgattggttgaccattggccgcatgggaaacttaatgggtgcgctgaaagtggaacaccctggcacccaaaatcagcgtttcgattttgccgaattcaacgaccagttcaaacaatattttggctacgcgctc

SEQ ID NO: 1284 - protein, 321 aa, synthetic construct
  REGION 1..321: note = variant of adenosine kinase from Xanthemonas campestris
MHHHHHHGGSGMSALICGSLAYDTIMVFPDQFKNHILPDRVHRLNVSFLVPRMRREFGGCAGNIAYNLHLLGGAPIVMATVGQDFGPYREHFETLGIDLSRVKIIDDLSTPQAFITTDMDHNQITAFHGGAMMRSYENHVRDVPGVTLGLVGPDGRPGMIQNAEEFAAGGIPFIFDPGQAVPLFNGPELREFIEQADYVVVNDYESNLLQARTGWNEQDIVSRVQAYITTQGSAGALVHTPEKTYDIPPAKTRRVVDPTGCGDAFRAGLIYGIQHNYDWLTIGRMGNLMGALKVEHPGTQNQRFDFAEFNDQFKQYFGYAL

SEQ ID NO: 1285 - DNA, 963 bp, synthetic construct
  misc_feature 1..963: note = variant of adenosine kinase from Xanthemonas campestris
  source 1..963: mol_type = other DNA
atgcaccatcatcaccatcacgggggctccggcatgagtgcactgatttgcggttctttagcgtatgataccatcatggtgtttccggaccagttcaagaaccatattctgcccgatcgtgttcaccgcctcaatgtcagctttcttgtaccacgcatgcgtcgtgaatttggaggctgtgccggcaacattgcgtacaatctgcatctgttgggtggtgctccgatcgtaatggctacggtgggccaagatttcggtccgtatcgcgagcacttcgaaactctgggcattgacttatcccgcgtcaagatcatcgatgatctgagtacaccgcaggccttcattaccaccgacatggatcataaccagattacggcgtttcacggcggcgcaatgatgcgttcgtacgaaaatcacgttcgtgatgtgccgggtgttaccttgggcctcgtaggtcctgatggacgcgagggcatgatccaaaatgccgaagaatttgctgctggtggcattccgttcatttttgacccaggtcaggcagtgccgctgttcaacggccccgaactgcgcgagtttatcgaacaggcggactatgtggtggtcaacgattacgaaagcaatcttcttcaagcccgtactggcttgaacgagcaggacattgtttcacgcgtgcaggcgtatatcaccacgcaaggttcggctggagccctggtacatacaccggagaagacctacgatattccgccggctaaaacccgtcgtgtcgttgatccaactggttgcggcgacgcgtttcgcgccggcctgatctatggtattcagcataattatgattggttgaccattggccgcatgggaaacttaatgggtgcgctgaaagtggaacaccctggcacccaaaatcagcgtttcgattttgccgaattcaacgaccagttcaaacaatattttggctacgcgctc

SEQ ID NO: 1286 - protein, 321 aa, synthetic construct
  REGION 1..321: note = variant of adenosine kinase from Xanthemonas campestris
MHHHHHHGGSGMSALICGSLAYDTIMVFPDQFKNHILPDRVHRLNVSFLVPRMRREFGGCAGNIAYNLHLLGGAPIVMATVGQDFGPYREHFETLGIDLSRVKIIDDLSTPQAFITTDMDHNQITAFHGGAMMRSYENHVRDVPGVTLGLVGPDGREGMIQNAEEFAAGGIPFIFDPGQAVPLFNGPELREFIEQADYVVVNDYESNLLQARTGLNEQDIVSRVQAYITTQGSAGALVHTPEKTYDIPPAKTRRVVDPTGCGDAFRAGLIYGIQHNYDWLTIGRMGNLMGALKVEHPGTQNQRFDFAEFNDQFKQYFGYAL

SEQ ID NO: 1287 - DNA, 963 bp, synthetic construct
  misc_feature 1..963: note = variant of adenosine kinase from Xanthemonas campestris
  source 1..963: mol_type = other DNA
atgcaccatcatcaccatcacgggggctccggcatgagtgcactgatttgcggttctttagcgtatgataccatcatggtgtttccggaccagttcaagaaccatattctgcccgatcgtgttcaccgcctcaatgtcagctttcttgtaccacgcatgcgtcgtgaatttggaggctgtgccggcaacattgcgtacaatctgcatctgttgggtggtgctccgatcgtaatggctgtggtgggccaagatttcggtccgtatcgcgagcacttcgaaactctgggcattgacttatcccgcgtcaagatcatcgatgatctgagtacaccgcaggccttcattaccaccgacatggatcataaccagattacggcgtttcacggcggcgcaatgatgcgttcgtacgaaaatcacgttcgtgatgtgccgggtgttaccttgggcctcgtaggtcctgatggacgcgagggcatgatccaaaatgccgaagaatttgctgctggtggcattccgttcatttttgacccaggtcaggcagtgccgctgttcaacggccccgaactgcgcgagtttatcgaacaggcggactatgtggtggtcaacgattacgaaagcaatcttcttcaagcccgtactggctggaacgagcaggacattgtttcacgcgtgcaggcgtatatcaccacgcaaggttcggctggagccctggtacatacaccggagaagacctacgatattccgccggctaaaacccgtcgtgtcgttgatccaactggttgcggcgacgcgtttcgcgccggcctgatctatggtattcagcataattatgattggttgaccattggccgcatgggaaacttaatgggtgcgctgaaagtggaacaccctggcacccaaaatcagcgtttcgattttgccgaattcaacgaccagttcaaacaatattttggctacgcgctc

SEQ ID NO: 1288 - protein, 321 aa, synthetic construct
  REGION 1..321: note = variant of adenosine kinase from Xanthemonas campestris
MHHHHHHGGSGMSALICGSLAYDTIMVFPDQFKNHILPDRVHRLNVSFLVPRMRREFGGCAGNIAYNLHLLGGAPIVMAVVGQDFGPYREHFETLGIDLSRVKIIDDLSTPQAFITTDMDHNQITAFHGGAMMRSYENHVRDVPGVTLGLVGPDGREGMIQNAEEFAAGGIPFIFDPGQAVPLFNGPELREFIEQADYVVVNDYESNLLQARTGWNEQDIVSRVQAYITTQGSAGALVHTPEKTYDIPPAKTRRVVDPTGCGDAFRAGLIYGIQHNYDWLTIGRMGNLMGALKVEHPGTQNQRFDFAEFNDQFKQYFGYAL

SEQ ID NO: 1289 - DNA, 963 bp, synthetic construct
  misc_feature 1..963: note = variant of adenosine kinase from Xanthemonas campestris
  source 1..963: mol_type = other DNA
atgcaccatcatcaccatcacgggggctccggcatgagtgcactgatttgcggttctttagcgtatgataccatcatggtgtttccggaccagttcaagaaccatattctgcccgatcgtgttcaccgcctcaatgtcagctttcttgtaccacgcatggttcgtgaatttggaggctgtgccggcaacattgcgtacaatctgcatctgttgggtggtgctccgatcgtaatggctacggtgggccaagatttcggtccgtatcgcgagcacttcgaaactctgggcattgacttatcccgcgtcaagatcatcgatgatctgagtacaccgcaggccttcattaccaccgacatggatcataaccagattacggcgtttcacggcggcgcaatgatgcgttcgtacgaaaatcacgttcgtgatgtgccgggtgttaccttgggcctcgtaggtcctgatggacgcgagggcatgatccaaaatgccgaagaatttgctgctggtggcattccgttcatttttgacccaggtcaggcagtgccgctgttcaacggccccgaactgcgcgagtttatcgaacaggcggactatgtggtggtcaacgattacgaaagcaatcttcttcaagcccgtactggctggaacgagcaggacattgtttcacgcgtgcaggcgtatatcaccacgcaaggttcggctggagccctggtacatacaccggagaagacctacgatattccgccggctaaaacccgtcgtgtcgttgatccaactggttgcggcgacgcgtttcgcgccggcctgatctatggtattcagcataattatgattggttgaccattggccgcatgggaaacttaatgggtgcgctgaaagtggaacaccctggcacccaaaatcagcgtttcgattttgccgaattcaacgaccagttcaaacaatattttggctacgcgctc

SEQ ID NO: 1290 - protein, 321 aa, synthetic construct
  REGION 1..321: note = variant of adenosine kinase from Xanthemonas campestris
MHHHHHHGGSGMSALICGSLAYDTIMVFPDQFKNHILPDRVHRLNVSFLVPRMVREFGGCAGNIAYNLHLLGGAPIVMATVGQDFGPYREHFETLGIDLSRVKIIDDLSTPQAFITTDMDHNQITAFHGGAMMRSYENHVRDVPGVTLGLVGPDGREGMIQNAEEFAAGGIPFIFDPGQAVPLFNGPELREFIEQADYVVVNDYESNLLQARTGWNEQDIVSRVQAYITTQGSAGALVHTPEKTYDIPPAKTRRVVDPTGCGDAFRAGLIYGIQHNYDWLTIGRMGNLMGALKVEHPGTQNQRFDFAEFNDQFKQYFGYAL

SEQ ID NO: 1291 - DNA, 963 bp, synthetic construct
  misc_feature 1..963: note = variant of adenosine kinase from Xanthemonas campestris
  source 1..963: mol_type = other DNA
atgcaccatcatcaccatcacgggggctccggcatgagtgcactgatttgcggttctttagcgtatgataccatcatggtgtttccggaccagttcaagaaccatattctgcccgatcgtgttcaccgcctcaatgtcagctttcttgtaccacgcatgcgtcgtgaatttggaggctgtgccggcaacattgcgtacaatctgcatctgttgggtggtgctccgatcgtaatggctacggtgggccaagatttcggtccgtatcgcgagcacttcgaaactctgggcattgacttatcccgcgtcaagatcatcgatgatctgagtacaccgcaggccttcattaccaccgacatggatcataaccagattacggcgtttcacggcggcgcaatgatgcgttcgtacgaaaatcacgttcgtgatgtgccgggtgttaccttgggcctcgtaggtcctgatggacgcgagggcatgatccaaaatgccgaagaatttgctgctggtggcattccgttcatttttgacccaggtcaggcagtgccgctgttcaacggccccgaactgcgcgagtttatcgaacaggcggactatgtggtggtcaacgattacgaaagcaatcttcttcaagcccgtactggctggaacgagcaggacattgtttcacgcgtgcaggcgtatatcaccacgcaaggttcggctggagccctggtagcgacaccggagaagacctacgatattccgccggctaaaacccgtcgtgtcgttgatccaactggttgcggcgacgcgtttcgcgccggcctgatctatggtattcagcataattatgattggttgaccattggccgcatgggaaacttaatgggtgcgctgaaagtggaacaccctggcacccaaaatcagcgtttcgattttgccgaattcaacgaccagttcaaacaatattttggctacgcgctc

SEQ ID NO: 1292 - protein, 321 aa, synthetic construct
  REGION 1..321: note = variant of adenosine kinase from Xanthemonas campestris
MHHHHHHGGSGMSALICGSLAYDTIMVFPDQFKNHILPDRVHRLNVSFLVPRMRREFGGCAGNIAYNLHLLGGAPIVMATVGQDFGPYREHFETLGIDLSRVKIIDDLSTPQAFITTDMDHNQITAFHGGAMMRSYENHVRDVPGVTLGLVGPDGREGMIQNAEEFAAGGIPFIFDPGQAVPLFNGPELREFIEQADYVVVNDYESNLLQARTGWNEQDIVSRVQAYITTQGSAGALVATPEKTYDIPPAKTRRVVDPTGCGDAFRAGLIYGIQHNYDWLTIGRMGNLMGALKVEHPGTQNQRFDFAEFNDQFKQYFGYAL

SEQ ID NO: 1293 - DNA, 963 bp, synthetic construct
  misc_feature 1..963: note = variant of adenosine kinase from Xanthemonas campestris
  source 1..963: mol_type = other DNA
atgcaccatcatcaccatcacgggggctccggcatggaggcactgatttgcggttctttagcgtatgataccatcatggtgtttccggaccagttcaagaaccatattctgcccgatcgtgttcaccgcctcaatgtcagctttcttgtaccacgcatgcgtcgtgaatttggaggctgtgccggcaacattgcgtacaatctgcatctgttgggtggtgctccgatcgtaatggctacggtgggccaagatttcggtccgtatcgcgagcacttcgaaactctgggcattgacttatcccgcgtcaagatcatcgatgatctgagtacaccgcaggccttcattaccaccgacatggatcataaccagattacggcgtttcacggcggcgcaatgatgcgttcgtacgaaaatcacgttcgtgatgtgccgggtgttaccttgggcctcgtaggtcctgatggacgcgagggcatgatccaaaatgccgaagaatttgctgctggtggcattccgttcatttttgacccaggtcaggcagtgccgctgttcaacggccccgaactgcgcgagtttatcgaacaggcggactatgtggtggtcaacgattacgaaagcaatcttcttcaagcccgtactggctggaacgagcaggacattgtttcacgcgtgcaggcgtatatcaccacgcaaggttcggctggagccctggtacatacaccggagaagacctacgatattccgccggctaaaacccgtcgtgtcgttgatccaactggttgcggcgacgcgtttcgcgccggcctgatctatggtattcagcataattatgattggttgaccattggccgcatgggaaacttaatgggtgcgctgaaagtggaacaccctggcacccaaaatcagcgtttcgattttgccgaattcaacgaccagttcaaacaatattttggctacgcgctc

SEQ ID NO: 1294 - protein, 321 aa, synthetic construct
  REGION 1..321: note = variant of adenosine kinase from Xanthemonas campestris
MHHHHHHGGSGMEALICGSLAYDTIMVFPDQFKNHILPDRVHRLNVSFLVPRMRREFGGCAGNIAYNLHLLGGAPIVMATVGQDFGPYREHFETLGIDLSRVKIIDDLSTPQAFITTDMDHNQITAFHGGAMMRSYENHVRDVPGVTLGLVGPDGREGMIQNAEEFAAGGIPFIFDPGQAVPLFNGPELREFIEQADYVVVNDYESNLLQARTGWNEQDIVSRVQAYITTQGSAGALVHTPEKTYDIPPAKTRRVVDPTGCGDAFRAGLIYGIQHNYDWLTIGRMGNLMGALKVEHPGTQNQRFDFAEFNDQFKQYFGYAL

SEQ ID NO: 1295 - DNA, 963 bp, synthetic construct
  misc_feature 1..963: note = variant of adenosine kinase from Xanthemonas campestris
  source 1..963: mol_type = other DNA
atgcaccatcatcaccatcacgggggctccggcatgagtgcactgatttgcggttctttagcgtatgataccatcatggtgtttccggaccagttcaagaaccatattctgcccgatcgtgttcaccgcctcaatgtcagctttcttgtaccacgcatgcgtcgtgaatttggaggctgtgccggcaacattgcgtacaatctgcatctgttgggtggtgctccgatcgtaatggctacggtgggccaagatttcggtccgtatcgcgagcacttcgaaactctgggcattgacttatcccgcgtcaagatcatcgatgatctgagtacaccgcaggccttcattaccaccgacatggatcataaccagattacggcgtttcacggcggcgcaatgatgcgttcgtacgaaaatcacgttcgtgatgtgccgggtgttaccttgggcctcgtaggtcctgatggacgcgagggcatgatccaaaatgccgaagaatttgctgctggtggcattccgttcatttttgacccaggtcaggcagtgccgctgttcaacggccccgaactgcgcgagtttatcgaacaggcggactatgtggtggtcaacgattacgaaagcgtgcttcttcaagcccgtactggctggaacgagcaggacattgtttcacgcgtgcaggcgtatatcaccacgcaaggttcggctggagccctggtacatacaccggagaagacctacgatattccgccggctaaaacccgtcgtgtcgttgatccaactggttgcggcgacgcgtttcgcgccggcctgatctatggtattcagcataattatgattggttgaccattggccgcatgggaaacttaatgggtgcgctgaaagtggaacaccctggcacccaaaatcagcgtttcgattttgccgaattcaacgaccagttcaaacaatattttggctacgcgctc

SEQ ID NO: 1296 - protein, 321 aa, synthetic construct
  REGION 1..321: note = variant of adenosine kinase from Xanthemonas campestris
MHHHHHHGGSGMSALICGSLAYDTIMVFPDQFKNHILPDRVHRLNVSFLVPRMRREFGGCAGNIAYNLHLLGGAPIVMATVGQDFGPYREHFETLGIDLSRVKIIDDLSTPQAFITTDMDHNQITAFHGGAMMRSYENHVRDVPGVTLGLVGPDGREGMIQNAEEFAAGGIPFIFDPGQAVPLFNGPELREFIEQADYVVVNDYESVLLQARTGWNEQDIVSRVQAYITTQGSAGALVHTPEKTYDIPPAKTRRVVDPTGCGDAFRAGLIYGIQHNYDWLTIGRMGNLMGALKVEHPGTQNQRFDFAEFNDQFKQYFGYAL

SEQ ID NO: 1297 - DNA, 963 bp, synthetic construct
  misc_feature 1..963: note = variant of adenosine kinase from Xanthemonas campestris
  source 1..963: mol_type = other DNA
atgcaccatcatcaccatcacgggggctccggcatgagtgcactgatttgcggttctttagcgtatgataccatcatggtgtttccggaccagttcaagaaccatattctgcccgatcgtgttcaccgcctcaatgtcagctttcttgtaccacgcatgcgtcgtgaatttggaggctgtgccggcaacattgcgtacaatctgcatctgttgggtggtgctccgatcgtaatggctacggtgggccaagatttcggtccgtatcgcgagcacttcgaaactctgggcattgacttatcccgcgtcaagatcatcgatgatctgagtacaccgcaggccttcattaccaccgacatggatcataaccagattacggcgtttcacggcggcgcaatgatgcgttcgtacgaaaatcacgttcgtgatgtgccgggtgttaccttgggcctcgtaggtcctgatggacgcgagggcatgatccaaaatgccgaagaatttgctgctggtggcattccgttcatttttgacccaggtcaggcagtgccgctgttcaacggccccgaactgcgcgagtttatcgaacaggcggactatgtggtggtcaacgattacgaaagcaatcttcttcaagcccgtactggctggaacgagcaggacattgtttcacgcgtgcaggcgtatatcaccacgcaaggttcggctggagccctggtacatgttccggagaagacctacgatattccgccggctaaaacccgtcgtgtcgttgatccaactggttgcggcgacgcgtttcgcgccggcctgatctatggtattcagcataattatgattggttgaccattggccgcatgggaaacttaatgggtgcgctgaaagtggaacaccctggcacccaaaatcagcgtttcgattttgccgaattcaacgaccagttcaaacaatattttggctacgcgctc

SEQ ID NO: 1298 - protein, 321 aa, synthetic construct
  REGION 1..321: note = variant of adenosine kinase from Xanthemonas campestris
MHHHHHHGGSGMSALICGSLAYDTIMVFPDQFKNHILPDRVHRLNVSFLVPRMRREFGGCAGNIAYNLHLLGGAPIVMATVGQDFGPYREHFETLGIDLSRVKIIDDLSTPQAFITTDMDHNQITAFHGGAMMRSYENHVRDVPGVTLGLVGPDGREGMIQNAEEFAAGGIPFIFDPGQAVPLFNGPELREFIEQADYVVVNDYESNLLQARTGWNEQDIVSRVQAYITTQGSAGALVHVPEKTYDIPPAKTRRVVDPTGCGDAFRAGLIYGIQHNYDWLTIGRMGNLMGALKVEHPGTQNQRFDFAEFNDQFKQYFGYAL

SEQ ID NO: 1299 - DNA, 963 bp, synthetic construct
  misc_feature 1..963: note = variant of adenosine kinase from Xanthemonas campestris
  source 1..963: mol_type = other DNA
atgcaccatcatcaccatcacgggggctccggcatgagtgcactgatttgcggttctttagcgtatgataccatcatggtgtttccggaccagttcaagaaccatattctgcccgatcgtgttcaccgcctcaatgtcagctttcttgtaccacgcatgcgtcgtgaatttggaggctgtgccggcaacattgcgtacaatctgcatctgttgggtggtgctccgatcgtaatggctacggtgggccaagatttcggtccgtatcgcgagcacttcgaaactctgggcattgacttatcccgcgtcaagatcatcgatgatctgagtacaccgcaggccttcattaccaccgacatggatcataaccagattacggcgtttcacggcggcgcaatggcgcgttcgtacgaaaatcacgttcgtgatgtgccgggtgttaccttgggcctcgtaggtcctgatggacgcgagggcatgatccaaaatgccgaagaatttgctgctggtggcattccgttcatttttgacccaggtcaggcagtgccgctgttcaacggccccgaactgcgcgagtttatcgaacaggcggactatgtggtggtcaacgattacgaaagcaatcttcttcaagcccgtactggctggaacgagcaggacattgtttcacgcgtgcaggcgtatatcaccacgcaaggttcggctggagccctggtacatacaccggagaagacctacgatattccgccggctaaaacccgtcgtgtcgttgatccaactggttgcggcgacgcgtttcgcgccggcctgatctatggtattcagcataattatgattggttgaccattggccgcatgggaaacttaatgggtgcgctgaaagtggaacaccctggcacccaaaatcagcgtttcgattttgccgaattcaacgaccagttcaaacaatattttggctacgcgctc

SEQ ID NO: 1300 - protein, 321 aa, synthetic construct
  REGION 1..321: note = variant of adenosine kinase from Xanthemonas campestris
MHHHHHHGGSGMSALICGSLAYDTIMVFPDQFKNHILPDRVHRLNVSFLVPRMRREFGGCAGNIAYNLHLLGGAPIVMATVGQDFGPYREHFETLGIDLSRVKIIDDLSTPQAFITTDMDHNQITAFHGGAMARSYENHVRDVPGVTLGLVGPDGREGMIQNAEEFAAGGIPFIFDPGQAVPLFNGPELREFIEQADYVVVNDYESNLLQARTGWNEQDIVSRVQAYITTQGSAGALVHTPEKTYDIPPAKTRRVVDPTGCGDAFRAGLIYGIQHNYDWLTIGRMGNLMGALKVEHPGTQNQRFDFAEFNDQFKQYFGYAL

SEQ ID NO: 1301 - DNA, 963 bp, synthetic construct
  misc_feature 1..963: note = variant of adenosine kinase from Xanthemonas campestris
  source 1..963: mol_type = other DNA
atgcaccatcatcaccatcacgggggctccggcatgagtgcactgatttgcggttctttagcgtatgataccatcatggtgtttccggaccagttcaagaaccatattctgcccgatcgtgttcaccgcctcaatgtcagctttcttgtaccacgcatgcgtcgtgaatttggaggctgtgccggcaacattgcgtacaatctgcatctgttgggtggtgctccgatcgtaatggctacggtgggccaagatttcggtccgtatcgcgagcacttcgaaactctgggcattgacttatcccgcgtcaagatcatcgatgatctgagtacaccgcaggccttcattaccaccgacatggatcataaccagattacggcgtttcacggcggcgcaatgatgcgttcgtacgaaaatcacgttcgtgatgtgccgggtgttaccttgggcctcgtaggtcctgatggacgcgagggcatgatccaaaatgccgaagaatttgctgctggtggcattccgttcatttttgacccaggtcaggcagtgccgctgttcaacggccccgaactgcgcgagtttatcgaacaggcggactatgtggtggtcaacgattacgaaagcaatcttcttttggcccgtactggctggaacgagcaggacattgtttcacgcgtgcaggcgtatatcaccacgcaaggttcggctggagccctggtacatacaccggagaagacctacgatattccgccggctaaaacccgtcgtgtcgttgatccaactggttgcggcgacgcgtttcgcgccggcctgatctatggtattcagcataattatgattggttgaccattggccgcatgggaaacttaatgggtgcgctgaaagtggaacaccctggcacccaaaatcagcgtttcgattttgccgaattcaacgaccagttcaaacaatattttggctacgcgctc

SEQ ID NO: 1302 - protein, 321 aa, synthetic construct
  REGION 1..321: note = variant of adenosine kinase from Xanthemonas campestris
MHHHHHHGGSGMSALICGSLAYDTIMVFPDQFKNHILPDRVHRLNVSFLVPRMRREFGGCAGNIAYNLHLLGGAPIVMATVGQDFGPYREHFETLGIDLSRVKIIDDLSTPQAFITTDMDHNQITAFHGGAMMRSYENHVRDVPGVTLGLVGPDGREGMIQNAEEFAAGGIPFIFDPGQAVPLFNGPELREFIEQADYVVVNDYESNLLLARTGWNEQDIVSRVQAYITTQGSAGALVHTPEKTYDIPPAKTRRVVDPTGCGDAFRAGLIYGIQHNYDWLTIGRMGNLMGALKVEHPGTQNQRFDFAEFNDQFKQYFGYAL

SEQ ID NO: 1303 - DNA, 963 bp, synthetic construct
  misc_feature 1..963: note = variant of adenosine kinase from Xanthemonas campestris
  source 1..963: mol_type = other DNA
atgcaccatcatcaccatcacgggggctccggcatgagtgcactgatttgcggttctttagcgtatgataccatcatggtgtttccggaccagttcaagaaccatattctgcccgatcgtgttcaccgcctcaatgtcagctttcttgtaccacgcatgcgtcgtgaatttggaggctgtgccggcaacattgcgtacaatctgcatctgttgggtggtgctccgatcgtaatggctacggtgggccaagatttcggtccgtatcgcgagcacttcgaaactctgggcattgacttatcccgcgtcaagatcatcgatgatctgagtacaccgcaggccttcattaccaccgacatggatcataaccagattacggcgtttcacggcggcgcaatgatgcgttcgtacgaaaatcacgttcgtgatgtgccgggtgttaccttgggcctcgtaggtcctgatggacgcgagggcatgatccaaaatgccgaagaatttgctgctggtggcattccgttcatttttgacccaggtcaggcagtgccgctgttcaacggccccgaactgcgcgagtttatcgaacaggcggactatgtggtggtcaacgattacgaaagcgctcttcttcaagcccgtactggctggaacgagcaggacattgtttcacgcgtgcaggcgtatatcaccacgcaaggttcggctggagccctggtacatacaccggagaagacctacgatattccgccggctaaaacccgtcgtgtcgttgatccaactggttgcggcgacgcgtttcgcgccggcctgatctatggtattcagcataattatgattggttgaccattggccgcatgggaaacttaatgggtgcgctgaaagtggaacaccctggcacccaaaatcagcgtttcgattttgccgaattcaacgaccagttcaaacaatattttggctacgcgctc

SEQ ID NO: 1304 - protein, 321 aa, synthetic construct
  REGION 1..321: note = variant of adenosine kinase from Xanthemonas campestris
MHHHHHHGGSGMSALICGSLAYDTIMVFPDQFKNHILPDRVHRLNVSFLVPRMRREFGGCAGNIAYNLHLLGGAPIVMATVGQDFGPYREHFETLGIDLSRVKIIDDLSTPQAFITTDMDHNQITAFHGGAMMRSYENHVRDVPGVTLGLVGPDGREGMIQNAEEFAAGGIPFIFDPGQAVPLFNGPELREFIEQADYVVVNDYESALLQARTGWNEQDIVSRVQAYITTQGSAGALVHTPEKTYDIPPAKTRRVVDPTGCGDAFRAGLIYGIQHNYDWLTIGRMGNLMGALKVEHPGTQNQRFDFAEFNDQFKQYFGYAL

SEQ ID NO: 1305 - DNA, 963 bp, synthetic construct
  misc_feature 1..963: note = variant of adenosine kinase from Xanthemonas campestris
  source 1..963: mol_type = other DNA
atgcaccatcatcaccatcacgggggctccggcatgagtgcactgatttgcggttctttagcgtataataccatcatggtgtttccggaccagttcaagaaccatattctgcccgatcgtgttcaccgcctcaatgtcagctttcttgtaccacgcatgcgtcgtgaatttggaggctgtgccggcaacattgcgtacaatctgcatctgttgggtggtgctccgatcgtaatggctacggtgggccaagatttcggtccgtatcgcgagcacttcgaaactctgggcattgacttatcccgcgtcaagatcatcgatgatctgagtacaccgcaggccttcattaccaccgacatggatcataaccagattacggcgtttcacggcggcgcaatgatgcgttcgtacgaaaatcacgttcgtgatgtgccgggtgttaccttgggcctcgtaggtcctgatggacgcgagggcatgatccaaaatgccgaagaatttgctgctggtggcattccgttcatttttgacccaggtcaggcagtgccgctgttcaacggccccgaactgcgcgagtttatcgaacaggcggactatgtggtggtcaacgattacgaaagcaatcttcttcaagcccgtactggctggaacgagcaggacattgtttcacgcgtgcaggcgtatatcaccacgcaaggttcggctggagccctggtacatacaccggagaagacctacgatattccgccggctaaaacccgtcgtgtcgttgatccaactggttgcggcgacgcgtttcgcgccggcctgatctatggtattcagcataattatgattggttgaccattggccgcatgggaaacttaatgggtgcgctgaaagtggaacaccctggcacccaaaatcagcgtttcgattttgccgaattcaacgaccagttcaaacaatattttggctacgcgctc

SEQ ID NO: 1306 - protein, 321 aa, synthetic construct
  REGION 1..321: note = variant of adenosine kinase from Xanthemonas campestris
MHHHHHHGGSGMSALICGSLAYNTIMVFPDQFKNHILPDRVHRLNVSFLVPRMRREFGGCAGNIAYNLHLLGGAPIVMATVGQDFGPYREHFETLGIDLSRVKIIDDLSTPQAFITTDMDHNQITAFHGGAMMRSYENHVRDVPGVTLGLVGPDGREGMIQNAEEFAAGGIPFIFDPGQAVPLFNGPELREFIEQADYVVVNDYESNLLQARTGWNEQDIVSRVQAYITTQGSAGALVHTPEKTYDIPPAKTRRVVDPTGCGDAFRAGLIYGIQHNYDWLTIGRMGNLMGALKVEHPGTQNQRFDFAEFNDQFKQYFGYAL

SEQ ID NO: 1307 - DNA, 963 bp, synthetic construct
  misc_feature 1..963: note = variant of adenosine kinase from Xanthemonas campestris
  source 1..963: mol_type = other DNA
atgcaccatcatcaccatcacgggggctccggcatgagtgcactgatttgcggttctttagcgtatgataccatcatggtgtttccggaccagttcaagaaccatattctgcccgatcgtgttcaccgcctcaatgtcagctttcttgtaccacgccggcgtcgtgaatttggaggctgtgccggcaacattgcgtacaatctgcatctgttgggtggtgctccgatcgtaatggctacggtgggccaagatttcggtccgtatcgcgagcacttcgaaactctgggcattgacttatcccgcgtcaagatcatcgatgatctgagtacaccgcaggccttcattaccaccgacatggatcataaccagattacggcgtttcacggcggcgcaatgatgcgttcgtacgaaaatcacgttcgtgatgtgccgggtgttaccttgggcctcgtaggtcctgatggacgcgagggcatgatccaaaatgccgaagaatttgctgctggtggcattccgttcatttttgacccaggtcaggcagtgccgctgttcaacggccccgaactgcgcgagtttatcgaacaggcggactatgtggtggtcaacgattacgaaagcaatcttcttcaagcccgtactggctggaacgagcaggacattgtttcacgcgtgcaggcgtatatcaccacgcaaggttcggctggagccctggtacatacaccggagaagacctacgatattccgccggctaaaacccgtcgtgtcgttgatccaactggttgcggcgacgcgtttcgcgccggcctgatctatggtattcagcataattatgattggttgaccattggccgcatgggaaacttaatgggtgcgctgaaagtggaacaccctggcacccaaaatcagcgtttcgattttgccgaattcaacgaccagttcaaacaatattttggctacgcgctc

SEQ ID NO: 1308 - protein, 321 aa, synthetic construct
  REGION 1..321: note = variant of adenosine kinase from Xanthemonas campestris
MHHHHHHGGSGMSALICGSLAYDTIMVFPDQFKNHILPDRVHRLNVSFLVPRRRREFGGCAGNIAYNLHLLGGAPIVMATVGQDFGPYREHFETLGIDLSRVKIIDDLSTPQAFITTDMDHNQITAFHGGAMMRSYENHVRDVPGVTLGLVGPDGREGMIQNAEEFAAGGIPFIFDPGQAVPLFNGPELREFIEQADYVVVNDYESNLLQARTGWNEQDIVSRVQAYITTQGSAGALVHTPEKTYDIPPAKTRRVVDPTGCGDAFRAGLIYGIQHNYDWLTIGRMGNLMGALKVEHPGTQNQRFDFAEFNDQFKQYFGYAL

SEQ ID NO: 1309 - DNA, 963 bp, synthetic construct
  misc_feature 1..963: note = variant of adenosine kinase from Xanthemonas campestris
  source 1..963: mol_type = other DNA
atgcaccatcatcaccatcacgggggctccggcatgagtgcactgatttgcggttctttagcgtatgataccatcatggtgtttccggaccagttcaagaaccatattctgcccgatcgtgttcaccgcctcaatgtcagctttcttgtaccacgcatgcgtcgtgaatttggaggctgtgccggcaacattgcgtacaatctgcatctgttgggtggtgctccgatcgtaatggctacggtgggccaagatttcggtaagtatcgcgagcacttcgaaactctgggcattgacttatcccgcgtcaagatcatcgatgatctgagtacaccgcaggccttcattaccaccgacatggatcataaccagattacggcgtttcacggcggcgcaatgatgcgttcgtacgaaaatcacgttcgtgatgtgccgggtgttaccttgggcctcgtaggtcctgatggacgcgagggcatgatccaaaatgccgaagaatttgctgctggtggcattccgttcatttttgacccaggtcaggcagtgccgctgttcaacggccccgaactgcgcgagtttatcgaacaggcggactatgtggtggtcaacgattacgaaagcaatcttcttcaagcccgtactggctggaacgagcaggacattgtttcacgcgtgcaggcgtatatcaccacgcaaggttcggctggagccctggtacatacaccggagaagacctacgatattccgccggctaaaacccgtcgtgtcgttgatccaactggttgcggcgacgcgtttcgcgccggcctgatctatggtattcagcataattatgattggttgaccattggccgcatgggaaacttaatgggtgcgctgaaagtggaacaccctggcacccaaaatcagcgtttcgattttgccgaattcaacgaccagttcaaacaatattttggctacgcgctc

SEQ ID NO: 1310 - protein, 321 aa, synthetic construct
  REGION 1..321: note = variant of adenosine kinase from Xanthemonas campestris
MHHHHHHGGSGMSALICGSLAYDTIMVFPDQFKNHILPDRVHRLNVSFLVPRMRREFGGCAGNIAYNLHLLGGAPIVMATVGQDFGKYREHFETLGIDLSRVKIIDDLSTPQAFITTDMDHNQITAFHGGAMMRSYENHVRDVPGVTLGLVGPDGREGMIQNAEEFAAGGIPFIFDPGQAVPLFNGPELREFIEQADYVVVNDYESNLLQARTGWNEQDIVSRVQAYITTQGSAGALVHTPEKTYDIPPAKTRRVVDPTGCGDAFRAGLIYGIQHNYDWLTIGRMGNLMGALKVEHPGTQNQRFDFAEFNDQFKQYFGYAL

SEQ ID NO: 1311 - DNA, 963 bp, synthetic construct
  misc_feature 1..963: note = variant of adenosine kinase from Xanthemonas campestris
  source 1..963: mol_type = other DNA
atgcaccatcatcaccatcacgggggctccggcatgagtgcactgatttgcggttctttagcgtatgataccatcatggtgtttccggaccagttcaagaaccatattctgcccgatcgtgttcaccgcctcaatgtcagctttcttgtaccacgcatgcgtcgtgaatttggaggctgtgccggcaacattgcgtacaatctgcatctgttgggtggtgctccgatcgtaatggctacggtgggccaagatttcggtccgtatcgcgagcacttcgaaactctgggcattgacttatcccgcgtcaagatcatcgatgatctgagtacaccgcaggccttcattaccaccgacatggatcataaccagattacggcgtttcacggcggcgcaatgatgcgttcgtacgaaaatcacgttcgtgatgtgccgggtgttaccttgggcctcgtaggtcctgatggacgcgagggcatgatccaaaatgccgaagaatttgctgctggtggcattccgttcatttttgacccaggtcaggcagtgccgctgttcaacggccccactctgcgcgagtttatcgaacaggcggactatgtggtggtcaacgattacgaaagcaatcttcttcaagcccgtactggctggaacgagcaggacattgtttcacgcgtgcaggcgtatatcaccacgcaaggttcggctggagccctggtacatacaccggagaagacctacgatattccgccggctaaaacccgtcgtgtcgttgatccaactggttgcggcgacgcgtttcgcgccggcctgatctatggtattcagcataattatgattggttgaccattggccgcatgggaaacttaatgggtgcgctgaaagtggaacaccctggcacccaaaatcagcgtttcgattttgccgaattcaacgaccagttcaaacaatattttggctacgcgctc

SEQ ID NO: 1312 - protein, 321 aa, synthetic construct
  REGION 1..321: note = variant of adenosine kinase from Xanthemonas campestris
MHHHHHHGGSGMSALICGSLAYDTIMVFPDQFKNHILPDRVHRLNVSFLVPRMRREFGGCAGNIAYNLHLLGGAPIVMATVGQDFGPYREHFETLGIDLSRVKIIDDLSTPQAFITTDMDHNQITAFHGGAMMRSYENHVRDVPGVTLGLVGPDGREGMIQNAEEFAAGGIPFIFDPGQAVPLFNGPTLREFIEQADYVVVNDYESNLLQARTGWNEQDIVSRVQAYITTQGSAGALVHTPEKTYDIPPAKTRRVVDPTGCGDAFRAGLIYGIQHNYDWLTIGRMGNLMGALKVEHPGTQNQRFDFAEFNDQFKQYFGYAL

SEQ ID NO: 1313 - DNA, 963 bp, synthetic construct
  misc_feature 1..963: note = variant of adenosine kinase from Xanthemonas campestris
  source 1..963: mol_type = other DNA
atgcaccatcatcaccatcacgggggctccggcatgagtgcactgatttgcggttctttagcgtatgataccatcatggtgtttccggaccagttcaagaaccatattctgcccgatcgtgttcaccgcctcaatgtcagctttcttgtaccacgcatgcgtcgtgaatttggaggctgtgccggcaacattgcgtacaatctgcatctgttgggtggtgctccgatcgtaatggctacggtgggccaagatttcggtccgtatcgcgagcacttcgaaactctgggcattgacttatcccgcgtcaagatcatcgatgatctgagtacaccgcaggccttcattaccaccgacatggatcataaccagattacggcgtttcacggcggcgcaatgatgcgttcgtacgaaaatcacgttcgtgatgtgccgggtgttaccttgggcctccttggtcctgatggacgcgagggcatgatccaaaatgccgaagaatttgctgctggtggcattccgttcatttttgacccaggtcaggcagtgccgctgttcaacggccccgaactgcgcgagtttatcgaacaggcggactatgtggtggtcaacgattacgaaagcaatcttcttcaagcccgtactggctggaacgagcaggacattgtttcacgcgtgcaggcgtatatcaccacgcaaggttcggctggagccctggtacatacaccggagaagacctacgatattccgccggctaaaacccgtcgtgtcgttgatccaactggttgcggcgacgcgtttcgcgccggcctgatctatggtattcagcataattatgattggttgaccattggccgcatgggaaacttaatgggtgcgctgaaagtggaacaccctggcacccaaaatcagcgtttcgattttgccgaattcaacgaccagttcaaacaatattttggctacgcgctc

SEQ ID NO: 1314 - protein, 321 aa, synthetic construct
  REGION 1..321: note = variant of adenosine kinase from Xanthemonas campestris
MHHHHHHGGSGMSALICGSLAYDTIMVFPDQFKNHILPDRVHRLNVSFLVPRMRREFGGCAGNIAYNLHLLGGAPIVMATVGQDFGPYREHFETLGIDLSRVKIIDDLSTPQAFITTDMDHNQITAFHGGAMMRSYENHVRDVPGVTLGLLGPDGREGMIQNAEEFAAGGIPFIFDPGQAVPLFNGPELREFIEQADYVVVNDYESNLLQARTGWNEQDIVSRVQAYITTQGSAGALVHTPEKTYDIPPAKTRRVVDPTGCGDAFRAGLIYGIQHNYDWLTIGRMGNLMGALKVEHPGTQNQRFDFAEFNDQFKQYFGYAL

SEQ ID NO: 1315 - DNA, 963 bp, synthetic construct
  misc_feature 1..963: note = variant of adenosine kinase from Xanthemonas campestris
  source 1..963: mol_type = other DNA
atgcaccatcatcaccatcacgggggctccggcatgagtgcactgatttgcggttctttagcgtatgataccatcatggtgtttcgtgaccagttcaagaaccatattctgcccgatcgtgttcaccgcctcaatgtcagctttcttgtaccacgcatgcgtcgtgaatttggaggctgtgccggcaacattgcgtacaatctgcatctgttgggtggtgctccgatcgtaatggctacggtgggccaagatttcggtccgtatcgcgagcacttcgaaactctgggcattgacttatcccgcgtcaagatcatcgatgatctgagtacaccgcaggccttcattaccaccgacatggatcataaccagattacggcgtttcacggcggcgcaatgatgcgttcgtacgaaaatcacgttcgtgatgtgccgggtgttaccttgggcctcgtaggtcctgatggacgcgagggcatgatccaaaatgccgaagaatttgctgctggtggcattccgttcatttttgacccaggtcaggcagtgccgctgttcaacggccccgaactgcgcgagtttatcgaacaggcggactatgtggtggtcaacgattacgaaagcaatcttcttcaagcccgtactggctggaacgagcaggacattgtttcacgcgtgcaggcgtatatcaccacgcaaggttcggctggagccctggtacatacaccggagaagacctacgatattccgccggctaaaacccgtcgtgtcgttgatccaactggttgcggcgacgcgtttcgcgccggcctgatctatggtattcagcataattatgattggttgaccattggccgcatgggaaacttaatgggtgcgctgaaagtggaacaccctggcacccaaaatcagcgtttcgattttgccgaattcaacgaccagttcaaacaatattttggctacgcgctc

SEQ ID NO: 1316 - protein, 321 aa, synthetic construct
  REGION 1..321: note = variant of adenosine kinase from Xanthemonas campestris
MHHHHHHGGSGMSALICGSLAYDTIMVFRDQFKNHILPDRVHRLNVSFLVPRMRREFGGCAGNIAYNLHLLGGAPIVMATVGQDFGPYREHFETLGIDLSRVKIIDDLSTPQAFITTDMDHNQITAFHGGAMMRSYENHVRDVPGVTLGLVGPDGREGMIQNAEEFAAGGIPFIFDPGQAVPLFNGPELREFIEQADYVVVNDYESNLLQARTGWNEQDIVSRVQAYITTQGSAGALVHTPEKTYDIPPAKTRRVVDPTGCGDAFRAGLIYGIQHNYDWLTIGRMGNLMGALKVEHPGTQNQRFDFAEFNDQFKQYFGYAL

SEQ ID NO: 1317 - DNA, 963 bp, synthetic construct
  misc_feature 1..963: note = variant of adenosine kinase from Xanthemonas campestris
  source 1..963: mol_type = other DNA
atgcaccatcatcaccatcacgggggctccggcatgagtgcactgatttgcggttctttagcgtatgataccatcatggtgtttccggaccagttcaagaaccatattctgcccgatcgtgttcaccgcctcaatgtcagctttcttgtaccacgcatgcgtcgtgaatttggaggctgtgccggcaacattgcgtacaatctgcatctgttgggtggtgctccgatcgtaatggctacggtgggccaagatttcggtccgtatcgcgagcacttcgaaactctgggcattgacttatcccgcgtcaagatcatcgatgatctgagtacaccgcaggccttcattaccaccgacatggatcataaccagattacggcgtttcacggcggcgcaatgatgcgttcgtacgaaaatcacgttcgtgatgtgccgggtgttaccttgggcctcgtaggtcctgatggacgcgagggcatgatccaaaatgccgaagaatttgctgctggtggcattccgttcatttttgacccaggtcaggcagtgccgctgttcaacggccccgaactgcgcgagtttatcgaacaggcggactatgtggtggtcaacgattacgaaagcaatcttcttcaagcccgtactggctggaacgagcaggacattgtttcacgcgtgcaggcgtatatcaccacgcaaggttcggctggagccctggtacatacaccggagaagacctacgatattccgccggctaaaacccgtcgtgtcgttgattcgactggttgcggcgacgcgtttcgcgccggcctgatctatggtattcagcataattatgattggttgaccattggccgcatgggaaacttaatgggtgcgctgaaagtggaacaccctggcacccaaaatcagcgtttcgattttgccgaattcaacgaccagttcaaacaatattttggctacgcgctc

SEQ ID NO: 1318 - protein, 321 aa, synthetic construct
  REGION 1..321: note = variant of adenosine kinase from Xanthemonas campestris
MHHHHHHGGSGMSALICGSLAYDTIMVFPDQFKNHILPDRVHRLNVSFLVPRMRREFGGCAGNIAYNLHLLGGAPIVMATVGQDFGPYREHFETLGIDLSRVKIIDDLSTPQAFITTDMDHNQITAFHGGAMMRSYENHVRDVPGVTLGLVGPDGREGMIQNAEEFAAGGIPFIFDPGQAVPLFNGPELREFIEQADYVVVNDYESNLLQARTGWNEQDIVSRVQAYITTQGSAGALVHTPEKTYDIPPAKTRRVVDSTGCGDAFRAGLIYGIQHNYDWLTIGRMGNLMGALKVEHPGTQNQRFDFAEFNDQFKQYFGYAL

SEQ ID NO: 1319 - DNA, 963 bp, synthetic construct
  misc_feature 1..963: note = variant of adenosine kinase from Xanthemonas campestris
  source 1..963: mol_type = other DNA
atgcaccatcatcaccatcacgggggctccggcatgagtgcactgatttgcggttctttagcgtatgataccatcatggtgtttccggaccagttcaaggggcatattctgcccgatcgtgttcaccgcctcaatgtcagctttcttgtaccacgcatgcgtcgtgaatttggaggctgtgccggcaacattgcgtacaatctgcatctgttgggtggtgctccgatcgtaatggctacggtgggccaagatttcggtccgtatcgcgagcacttcgaaactctgggcattgacttatcccgcgtcaagatcatcgatgatctgagtacaccgcaggccttcattaccaccgacatggatcataaccagattacggcgtttcacggcggcgcaatgatgcgttcgtacgaaaatcacgttcgtgatgtgccgggtgttaccttgggcctcgtaggtcctgatggacgcgagggcatgatccaaaatgccgaagaatttgctgctggtggcattccgttcatttttgacccaggtcaggcagtgccgctgttcaacggccccgaactgcgcgagtttatcgaacaggcggactatgtggtggtcaacgattacgaaagcaatcttcttcaagcccgtactggctggaacgagcaggacattgtttcacgcgtgcaggcgtatatcaccacgcaaggttcggctggagccctggtacatacaccggagaagacctacgatattccgccggctaaaacccgtcgtgtcgttgatccaactggttgcggcgacgcgtttcgcgccggcctgatctatggtattcagcataattatgattggttgaccattggccgcatgggaaacttaatgggtgcgctgaaagtggaacaccctggcacccaaaatcagcgtttcgattttgccgaattcaacgaccagttcaaacaatattttggctacgcgctc

SEQ ID NO: 1320 - protein, 321 aa, synthetic construct
  REGION 1..321: note = variant of adenosine kinase from Xanthemonas campestris
MHHHHHHGGSGMSALICGSLAYDTIMVFPDQFKGHILPDRVHRLNVSFLVPRMRREFGGCAGNIAYNLHLLGGAPIVMATVGQDFGPYREHFETLGIDLSRVKIIDDLSTPQAFITTDMDHNQITAFHGGAMMRSYENHVRDVPGVTLGLVGPDGREGMIQNAEEFAAGGIPFIFDPGQAVPLFNGPELREFIEQADYVVVNDYESNLLQARTGWNEQDIVSRVQAYITTQGSAGALVHTPEKTYDIPPAKTRRVVDPTGCGDAFRAGLIYGIQHNYDWLTIGRMGNLMGALKVEHPGTQNQRFDFAEFNDQFKQYFGYAL

SEQ ID NO: 1321 - DNA, 963 bp, synthetic construct
  misc_feature 1..963: note = variant of adenosine kinase from Xanthemonas campestris
  source 1..963: mol_type = other DNA
atgcaccatcatcaccatcacgggggctccggcatgagtgcactgatttgcggttctttagcgtatgataccatcatggtgtttccggaccagttcaagaaccatattctgcccgatcgtgttcaccgcctcaatgtcagctttcttgtaccacgcatgcgtcgtgaatttggaggctgtgccggcaacattgcgtacaatctgcatctgttgggtggtgctccgatcgtaatggctacggtgggccaagatttcggtccgtatcgcgagcacttcgaaactctgggcattgacttatcccgcgtcaagatcatcgatgatctgagtacaccgcaggccttcattaccaccgacatggatcataaccagattacggcgtttcacggcggcgcaatgatgcgttcgtacgaaaatcacgttcgtgatgtgccgggtgttaccttgggcctcgtaggtcctgatggacgcgagggcatgatccaaaatgccgaagaatttgctgctggtggcattccgttcatttttgacccaggtcaggcagtgccgctgttcaacggccccgaactgcgcgagtttatcgaacaggcggactatgtggtggtcaacgattacgaaagcaatcttcttcaagcccgtactggctggaacgagcaggacattgtttcacgcgtgcaggcgtatatcaccacgcaaggttcggctggagccctgctgcatacaccggagaagacctacgatattccgccggctaaaacccgtcgtgtcgttgatccaactggttgcggcgacgcgtttcgcgccggcctgatctatggtattcagcataattatgattggttgaccattggccgcatgggaaacttaatgggtgcgctgaaagtggaacaccctggcacccaaaatcagcgtttcgattttgccgaattcaacgaccagttcaaacaatattttggctacgcgctc

SEQ ID NO: 1322 - protein, 321 aa, synthetic construct
  REGION 1..321: note = variant of adenosine kinase from Xanthemonas campestris
MHHHHHHGGSGMSALICGSLAYDTIMVFPDQFKNHILPDRVHRLNVSFLVPRMRREFGGCAGNIAYNLHLLGGAPIVMATVGQDFGPYREHFETLGIDLSRVKIIDDLSTPQAFITTDMDHNQITAFHGGAMMRSYENHVRDVPGVTLGLVGPDGREGMIQNAEEFAAGGIPFIFDPGQAVPLFNGPELREFIEQADYVVVNDYESNLLQARTGWNEQDIVSRVQAYITTQGSAGALLHTPEKTYDIPPAKTRRVVDPTGCGDAFRAGLIYGIQHNYDWLTIGRMGNLMGALKVEHPGTQNQRFDFAEFNDQFKQYFGYAL

SEQ ID NO: 1323 - DNA, 963 bp, synthetic construct
  misc_feature 1..963: note = variant of adenosine kinase from Xanthemonas campestris
  source 1..963: mol_type = other DNA
atgcaccatcatcaccatcacgggggctccggcatgagtgcactgatttgcggttctttagcgtatgataccatcatgcggtttccggaccagttcaagaaccatattctgcccgatcgtgttcaccgcctcaatgtcagctttcttgtaccacgcatgcgtcgtgaatttggaggctgtgccggcaacattgcgtacaatctgcatctgttgggtggtgctccgatcgtaatggctacggtgggccaagatttcggtccgtatcgcgagcacttcgaaactctgggcattgacttatcccgcgtcaagatcatcgatgatctgagtacaccgcaggccttcattaccaccgacatggatcataaccagattacggcgtttcacggcggcgcaatgatgcgttcgtacgaaaatcacgttcgtgatgtgccgggtgttaccttgggcctcgtaggtcctgatggacgcgagggcatgatccaaaatgccgaagaatttgctgctggtggcattccgttcatttttgacccaggtcaggcagtgccgctgttcaacggccccgaactgcgcgagtttatcgaacaggcggactatgtggtggtcaacgattacgaaagcaatcttcttcaagcccgtactggctggaacgagcaggacattgtttcacgcgtgcaggcgtatatcaccacgcaaggttcggctggagccctggtacatacaccggagaagacctacgatattccgccggctaaaacccgtcgtgtcgttgatccaactggttgcggcgacgcgtttcgcgccggcctgatctatggtattcagcataattatgattggttgaccattggccgcatgggaaacttaatgggtgcgctgaaagtggaacaccctggcacccaaaatcagcgtttcgattttgccgaattcaacgaccagttcaaacaatattttggctacgcgctc

SEQ ID NO: 1324 - protein, 321 aa, synthetic construct
  REGION 1..321: note = variant of adenosine kinase from Xanthemonas campestris
MHHHHHHGGSGMSALICGSLAYDTIMRFPDQFKNHILPDRVHRLNVSFLVPRMRREFGGCAGNIAYNLHLLGGAPIVMATVGQDFGPYREHFETLGIDLSRVKIIDDLSTPQAFITTDMDHNQITAFHGGAMMRSYENHVRDVPGVTLGLVGPDGREGMIQNAEEFAAGGIPFIFDPGQAVPLFNGPELREFIEQADYVVVNDYESNLLQARTGWNEQDIVSRVQAYITTQGSAGALVHTPEKTYDIPPAKTRRVVDPTGCGDAFRAGLIYGIQHNYDWLTIGRMGNLMGALKVEHPGTQNQRFDFAEFNDQFKQYFGYAL

SEQ ID NO: 1325 - DNA, 963 bp, synthetic construct
  misc_feature 1..963: note = variant of adenosine kinase from Xanthemonas campestris
  source 1..963: mol_type = other DNA
atgcaccatcatcaccatcacgggggctccggcatgagttcgctgatttgcggttctttagcgtatgataccatcatggtgtttccggaccagttcaagaaccatattctgcccgatcgtgttcaccgcctcaatgtcagctttcttgtaccacgcatgcgtcgtgaatttggaggctgtgccggcaacattgcgtacaatctgcatctgttgggtggtgctccgatcgtaatggctacggtgggccaagatttcggtccgtatcgcgagcacttcgaaactctgggcattgacttatcccgcgtcaagatcatcgatgatctgagtacaccgcaggccttcattaccaccgacatggatcataaccagattacggcgtttcacggcggcgcaatgatgcgttcgtacgaaaatcacgttcgtgatgtgccgggtgttaccttgggcctcgtaggtcctgatggacgcgagggcatgatccaaaatgccgaagaatttgctgctggtggcattccgttcatttttgacccaggtcaggcagtgccgctgttcaacggccccgaactgcgcgagtttatcgaacaggcggactatgtggtggtcaacgattacgaaagcaatcttcttcaagcccgtactggctggaacgagcaggacattgtttcacgcgtgcaggcgtatatcaccacgcaaggttcggctggagccctggtacatacaccggagaagacctacgatattccgccggctaaaacccgtcgtgtcgttgatccaactggttgcggcgacgcgtttcgcgccggcctgatctatggtattcagcataattatgattggttgaccattggccgcatgggaaacttaatgggtgcgctgaaagtggaacaccctggcacccaaaatcagcgtttcgattttgccgaattcaacgaccagttcaaacaatattttggctacgcgctc

SEQ ID NO: 1326 - protein, 321 aa, synthetic construct
  REGION 1..321: note = variant of adenosine kinase from Xanthemonas campestris
MHHHHHHGGSGMSSLICGSLAYDTIMVFPDQFKNHILPDRVHRLNVSFLVPRMRREFGGCAGNIAYNLHLLGGAPIVMATVGQDFGPYREHFETLGIDLSRVKIIDDLSTPQAFITTDMDHNQITAFHGGAMMRSYENHVRDVPGVTLGLVGPDGREGMIQNAEEFAAGGIPFIFDPGQAVPLFNGPELREFIEQADYVVVNDYESNLLQARTGWNEQDIVSRVQAYITTQGSAGALVHTPEKTYDIPPAKTRRVVDPTGCGDAFRAGLIYGIQHNYDWLTIGRMGNLMGALKVEHPGTQNQRFDFAEFNDQFKQYFGYAL

SEQ ID NO: 1327 - DNA, 963 bp, synthetic construct
  misc_feature 1..963: note = variant of adenosine kinase from Xanthemonas campestris
  source 1..963: mol_type = other DNA
atgcaccatcatcaccatcacgggggctccggcatgagtgcactgatttgcggttctttagcgtatgataccatcatggtgtttccggaccagttcaagaaccatattctgcccgatcgtgttcaccgcctcaatgtcagctttcttgtaccacgcatgcgtcgtgaatttggaggctgtgccggcaacattgcgtacaatctgcatctgttgggtggtgctccgatcgtaatggctacggtgggccaagatttcggtccgtatcgcgagcacttcgaaactctgggcattgacttatcccgcgtcaagatcatcgatgatctgagtacaccgcaggccttcattaccaccgacatggatcataaccagattacggcgtttcacggcggcgcaatgatgcgttcgtacgaaaatcacgttcgtgatgtgccgggtgttaccttgggcctcgtaggtcctgatggacgcgagggcatgatccaaaatgccgaagaatttgctgctggtggcattccgttcatttttgacccaggtcaggcagtgccgctgttcaacggccccgaactgcgcgagtttatcgaacaggcggactatgtggtggtcaacgattacgaaagcaatcttcttcaagcccgtactggctggaacgagcaggacattgtttcacgcgtgcaggcgtatatcaccacgcaaggttcggctggagccctggtacatacaccggagaagtggtacgatattccgccggctaaaacccgtcgtgtcgttgatccaactggttgcggcgacgcgtttcgcgccggcctgatctatggtattcagcataattatgattggttgaccattggccgcatgggaaacttaatgggtgcgctgaaagtggaacaccctggcacccaaaatcagcgtttcgattttgccgaattcaacgaccagttcaaacaatattttggctacgcgctc

SEQ ID NO: 1328 - protein, 321 aa, synthetic construct
  REGION 1..321: note = variant of adenosine kinase from Xanthemonas campestris
MHHHHHHGGSGMSALICGSLAYDTIMVFPDQFKNHILPDRVHRLNVSFLVPRMRREFGGCAGNIAYNLHLLGGAPIVMATVGQDFGPYREHFETLGIDLSRVKIIDDLSTPQAFITTDMDHNQITAFHGGAMMRSYENHVRDVPGVTLGLVGPDGREGMIQNAEEFAAGGIPFIFDPGQAVPLFNGPELREFIEQADYVVVNDYESNLLQARTGWNEQDIVSRVQAYITTQGSAGALVHTPEKWYDIPPAKTRRVVDPTGCGDAFRAGLIYGIQHNYDWLTIGRMGNLMGALKVEHPGTQNQRFDFAEFNDQFKQYFGYAL

SEQ ID NO: 1329 - DNA, 963 bp, synthetic construct
  misc_feature 1..963: note = variant of adenosine kinase from Xanthemonas campestris
  source 1..963: mol_type = other DNA
atgcaccatcatcaccatcacgggggctccggcatgagtgcactgatttgcggttctttagcgtatgataccatcatggtgtttccggaccagttcaagaaccatattctgcccgatcgtgttcaccgcctcaatgtcagctttcttgtaccacgcatgcgtcgtgaatttggaggctgtgccggcaacattgcgtacaatctgcatctgttgggtggtgctccgatcgtaatggctacggtgggccaagatttcggtccgtatcgcgagcacttcgaaactctgggcattgacttatcccgcgtcaagatcatcgatgatctgagtacaccgcaggccttcattaccaccgacatggatcataaccagattacggcgtttcacggcggcgcaatgatgcgttcgtacgaaaatcacgttcgtgatgtgccgggtgttaccttgggcctcgtaggtcctgatggacgcgagggcatgatccaaaatgccgaagaatttgctgctggtggcattccgttcatttttgacccaggtcaggcagtgccgctgttcaacggccccgaactgcgcgagctgatcgaacaggcggactatgtggtggtcaacgattacgaaagcaatcttcttcaagcccgtactggctggaacgagcaggacattgtttcacgcgtgcaggcgtatatcaccacgcaaggttcggctggagccctggtacatacaccggagaagacctacgatattccgccggctaaaacccgtcgtgtcgttgatccaactggttgcggcgacgcgtttcgcgccggcctgatctatggtattcagcataattatgattggttgaccattggccgcatgggaaacttaatgggtgcgctgaaagtggaacaccctggcacccaaaatcagcgtttcgattttgccgaattcaacgaccagttcaaacaatattttggctacgcgctc

SEQ ID NO: 1330 - protein, 321 aa, synthetic construct
  REGION 1..321: note = variant of adenosine kinase from Xanthemonas campestris
MHHHHHHGGSGMSALICGSLAYDTIMVFPDQFKNHILPDRVHRLNVSFLVPRMRREFGGCAGNIAYNLHLLGGAPIVMATVGQDFGPYREHFETLGIDLSRVKIIDDLSTPQAFITTDMDHNQITAFHGGAMMRSYENHVRDVPGVTLGLVGPDGREGMIQNAEEFAAGGIPFIFDPGQAVPLFNGPELRELIEQADYVVVNDYESNLLQARTGWNEQDIVSRVQAYITTQGSAGALVHTPEKTYDIPPAKTRRVVDPTGCGDAFRAGLIYGIQHNYDWLTIGRMGNLMGALKVEHPGTQNQRFDFAEFNDQFKQYFGYAL

SEQ ID NO: 1331 - DNA, 963 bp, synthetic construct
  misc_feature 1..963: note = variant of adenosine kinase from Xanthemonas campestris
  source 1..963: mol_type = other DNA
atgcaccatcatcaccatcacgggggctccggcatgagtgcactgatttgcggttctttagcgtatgataccatcatggtgtttccggaccagttcaagaaccatattctgcccgatcgtgttcaccgcctcaatgtcagctttcttgtaccacgcatgcgtcgtgaatttggaggctgtgccggcaacattgcgtacaatctgcatctgttgggtggtgctccgatcgtaatggctacggtgggccaagatttcggtccgtatcgcgagtatttcgaaactctgggcattgacttatcccgcgtcaagatcatcgatgatctgagtacaccgcaggccttcattaccaccgacatggatcataaccagattacggcgtttcacggcggcgcaatgatgcgttcgtacgaaaatcacgttcgtgatgtgccgggtgttaccttgggcctcgtaggtcctgatggacgcgagggcatgatccaaaatgccgaagaatttgctgctggtggcattccgttcatttttgacccaggtcaggcagtgccgctgttcaacggccccgaactgcgcgagtttatcgaacaggcggactatgtggtggtcaacgattacgaaagcaatcttcttcaagcccgtactggctggaacgagcaggacattgtttcacgcgtgcaggcgtatatcaccacgcaaggttcggctggagccctggtacatacaccggagaagacctacgatattccgccggctaaaacccgtcgtgtcgttgatccaactggttgcggcgacgcgtttcgcgccggcctgatctatggtattcagcataattatgattggttgaccattggccgcatgggaaacttaatgggtgcgctgaaagtggaacaccctggcacccaaaatcagcgtttcgattttgccgaattcaacgaccagttcaaacaatattttggctacgcgctc

SEQ ID NO: 1332 - protein, 321 aa, synthetic construct
  REGION 1..321: note = variant of adenosine kinase from Xanthemonas campestris
MHHHHHHGGSGMSALICGSLAYDTIMVFPDQFKNHILPDRVHRLNVSFLVPRMRREFGGCAGNIAYNLHLLGGAPIVMATVGQDFGPYREYFETLGIDLSRVKIIDDLSTPQAFITTDMDHNQITAFHGGAMMRSYENHVRDVPGVTLGLVGPDGREGMIQNAEEFAAGGIPFIFDPGQAVPLFNGPELREFIEQADYVVVNDYESNLLQARTGWNEQDIVSRVQAYITTQGSAGALVHTPEKTYDIPPAKTRRVVDPTGCGDAFRAGLIYGIQHNYDWLTIGRMGNLMGALKVEHPGTQNQRFDFAEFNDQFKQYFGYAL

SEQ ID NO: 1333 - DNA, 963 bp, synthetic construct
  misc_feature 1..963: note = variant of adenosine kinase from Xanthemonas campestris
  source 1..963: mol_type = other DNA
atgcaccatcatcaccatcacgggggctccggcatgagtgcactgatttgcggttctttagcgtatgataccatcatggtgtttccggaccagttcaagaaccatattctgcccgatcgtgttcaccgcctcaatgtcagctttcttgtaccacgcatgcgtcgtgaatttggaggctgtgccggcaacattgcgtacaatctgcatctgttgggtggtgctccgatcgtaatggctacggtgggccaagatttcggtccgtatcgcgagcacttcgaaactctgggcattgacttatcccgcgtcaagatcatcgatgatctgagtacaccgcaggccttcattaccaccgacatggatcataaccagattacggcgtttcacggcggcgcaatgatgcgttcgtacgaaaatcacgttcgtgatgtgccgggtgttaccttgggcctcgtaggtcctgatggacgcgagggcatgatccaaaatgccgaagaatttgctgctggtggcattccgttcatttttgacccaggtcaggcagtgccgctgttcaacggccccgaactgcgcgagtttatcgaacaggcggactatgtggtggtcaacgattacgaacataatcttcttcaagcccgtactggctggaacgagcaggacattgtttcacgcgtgcaggcgtatatcaccacgcaaggttcggctggagccctggtacatacaccggagaagacctacgatattccgccggctaaaacccgtcgtgtcgttgatccaactggttgcggcgacgcgtttcgcgccggcctgatctatggtattcagcataattatgattggttgaccattggccgcatgggaaacttaatgggtgcgctgaaagtggaacaccctggcacccaaaatcagcgtttcgattttgccgaattcaacgaccagttcaaacaatattttggctacgcgctc

SEQ ID NO: 1334 - protein, 321 aa, synthetic construct
  REGION 1..321: note = variant of adenosine kinase from Xanthemonas campestris
MHHHHHHGGSGMSALICGSLAYDTIMVFPDQFKNHILPDRVHRLNVSFLVPRMRREFGGCAGNIAYNLHLLGGAPIVMATVGQDFGPYREHFETLGIDLSRVKIIDDLSTPQAFITTDMDHNQITAFHGGAMMRSYENHVRDVPGVTLGLVGPDGREGMIQNAEEFAAGGIPFIFDPGQAVPLFNGPELREFIEQADYVVVNDYEHNLLQARTGWNEQDIVSRVQAYITTQGSAGALVHTPEKTYDIPPAKTRRVVDPTGCGDAFRAGLIYGIQHNYDWLTIGRMGNLMGALKVEHPGTQNQRFDFAEFNDQFKQYFGYAL

SEQ ID NO: 1335 - DNA, 963 bp, synthetic construct
  misc_feature 1..963: note = variant of adenosine kinase from Xanthemonas campestris
  source 1..963: mol_type = other DNA
atgcaccatcatcaccatcacgggggctccggcatgagtgcactgatttgcggttctttagcgtatgataccatcatggtgtttccgtatcagttcaagaaccatattctgcccgatcgtgttcaccgcctcaatgtcagctttcttgtaccacgcatgcgtcgtgaatttggaggctgtgccggcaacattgcgtacaatctgcatctgttgggtggtgctccgatcgtaatggctacggtgggccaagatttcggtccgtatcgcgagcacttcgaaactctgggcattgacttatcccgcgtcaagatcatcgatgatctgagtacaccgcaggccttcattaccaccgacatggatcataaccagattacggcgtttcacggcggcgcaatgatgcgttcgtacgaaaatcacgttcgtgatgtgccgggtgttaccttgggcctcgtaggtcctgatggacgcgagggcatgatccaaaatgccgaagaatttgctgctggtggcattccgttcatttttgacccaggtcaggcagtgccgctgttcaacggccccgaactgcgcgagtttatcgaacaggcggactatgtggtggtcaacgattacgaaagcaatcttcttcaagcccgtactggctggaacgagcaggacattgtttcacgcgtgcaggcgtatatcaccacgcaaggttcggctggagccctggtacatacaccggagaagacctacgatattccgccggctaaaacccgtcgtgtcgttgatccaactggttgcggcgacgcgtttcgcgccggcctgatctatggtattcagcataattatgattggttgaccattggccgcatgggaaacttaatgggtgcgctgaaagtggaacaccctggcacccaaaatcagcgtttcgattttgccgaattcaacgaccagttcaaacaatattttggctacgcgctc

SEQ ID NO: 1336 - protein, 321 aa, synthetic construct
  REGION 1..321: note = variant of adenosine kinase from Xanthemonas campestris
MHHHHHHGGSGMSALICGSLAYDTIMVFPYQFKNHILPDRVHRLNVSFLVPRMRREFGGCAGNIAYNLHLLGGAPIVMATVGQDFGPYREHFETLGIDLSRVKIIDDLSTPQAFITTDMDHNQITAFHGGAMMRSYENHVRDVPGVTLGLVGPDGREGMIQNAEEFAAGGIPFIFDPGQAVPLFNGPELREFIEQADYVVVNDYESNLLQARTGWNEQDIVSRVQAYITTQGSAGALVHTPEKTYDIPPAKTRRVVDPTGCGDAFRAGLIYGIQHNYDWLTIGRMGNLMGALKVEHPGTQNQRFDFAEFNDQFKQYFGYAL

SEQ ID NO: 1337 - DNA, 963 bp, synthetic construct
  misc_feature 1..963: note = variant of adenosine kinase from Xanthemonas campestris
  source 1..963: mol_type = other DNA
atgcaccatcatcaccatcacgggggctccggcatgagtgcactgatttgcggttctttagcgtatgataccatcatggtgtttccggaccagttcaagaaccatattctgcccgatcgtgttcaccgcctcaatgtcagctttcttgtaccacgcatgcgtcgtgaatttggaggctgtgccggcaacattgcgtacaatctgcatctgttgggtggtgctccgatcgtaatggctagtgtgggccaagatttcggtccgtatcgcgagcacttcgaaactctgggcattgacttatcccgcgtcaagatcatcgatgatctgagtacaccgcaggccttcattaccaccgacatggatcataaccagattacggcgtttcacggcggcgcaatgatgcgttcgtacgaaaatcacgttcgtgatgtgccgggtgttaccttgggcctcgtaggtcctgatggacgcgagggcatgatccaaaatgccgaagaatttgctgctggtggcattccgttcatttttgacccaggtcaggcagtgccgctgttcaacggccccgaactgcgcgagtttatcgaacaggcggactatgtggtggtcaacgattacgaaagcaatcttcttcaagcccgtactggctggaacgagcaggacattgtttcacgcgtgcaggcgtatatcaccacgcaaggttcggctggagccctggtacatacaccggagaagacctacgatattccgccggctaaaacccgtcgtgtcgttgatccaactggttgcggcgacgcgtttcgcgccggcctgatctatggtattcagcataattatgattggttgaccattggccgcatgggaaacttaatgggtgcgctgaaagtggaacaccctggcacccaaaatcagcgtttcgattttgccgaattcaacgaccagttcaaacaatattttggctacgcgctc

SEQ ID NO: 1338 - protein, 321 aa, synthetic construct
  REGION 1..321: note = variant of adenosine kinase from Xanthemonas campestris
MHHHHHHGGSGMSALICGSLAYDTIMVFPDQFKNHILPDRVHRLNVSFLVPRMRREFGGCAGNIAYNLHLLGGAPIVMASVGQDFGPYREHFETLGIDLSRVKIIDDLSTPQAFITTDMDHNQITAFHGGAMMRSYENHVRDVPGVTLGLVGPDGREGMIQNAEEFAAGGIPFIFDPGQAVPLFNGPELREFIEQADYVVVNDYESNLLQARTGWNEQDIVSRVQAYITTQGSAGALVHTPEKTYDIPPAKTRRVVDPTGCGDAFRAGLIYGIQHNYDWLTIGRMGNLMGALKVEHPGTQNQRFDFAEFNDQFKQYFGYAL

SEQ ID NO: 1339 - DNA, 963 bp, synthetic construct
  misc_feature 1..963: note = variant of adenosine kinase from Xanthemonas campestris
  source 1..963: mol_type = other DNA
atgcaccatcatcaccatcacgggggctccggcatgagtgcactgatttgcggttctttagcgtatgataccatcatggtgtttccggaccagttcaagaaccatattctgcccgatcgtgttcaccgcctcaatgtcagctttcttgtaccacgcatgcgtcgtgaatttggaggctgtgccggcaacattgcgtacaatctgcatctgttgggtggtgctccgatcgtaatggctacggtgggccaagatttcggtccgtatcgcgagcacttcgaaactctgggcattgacttatcccgcgtcaagatcatcgatgatctgagtacaccgcaggccttcattaccaccgacatggatcataaccagattacggcgtttcacggcggcgcaatgatgcgttcgtacgaaaatcacgttcgtgatgtgccgggtgttaccttgggcctcgtaggtcctgatggacgcgagggcatgatccaaaatgccgaagaatttgctgctggtggcattccgttcatttttgacccaggtcaggcagtgccgctgttcaacggccccgaactgcgcgagtttatcgaacaggcggactatgtggtggtcaacgattacgaaagcaatcttcttcaagcccgtactggctggaacgagcaggacattgtttcacgcgtgcaggcgtatatcaccacgcaaggttcggctggagccctggtacatacaccggagaagacctacgatattccgccggctaaaacccgtcgtgtcgttgatcggactggttgcggcgacgcgtttcgcgccggcctgatctatggtattcagcataattatgattggttgaccattggccgcatgggaaacttaatgggtgcgctgaaagtggaacaccctggcacccaaaatcagcgtttcgattttgccgaattcaacgaccagttcaaacaatattttggctacgcgctc

SEQ ID NO: 1340 - protein, 321 aa, synthetic construct
  REGION 1..321: note = variant of adenosine kinase from Xanthemonas campestris
MHHHHHHGGSGMSALICGSLAYDTIMVFPDQFKNHILPDRVHRLNVSFLVPRMRREFGGCAGNIAYNLHLLGGAPIVMATVGQDFGPYREHFETLGIDLSRVKIIDDLSTPQAFITTDMDHNQITAFHGGAMMRSYENHVRDVPGVTLGLVGPDGREGMIQNAEEFAAGGIPFIFDPGQAVPLFNGPELREFIEQADYVVVNDYESNLLQARTGWNEQDIVSRVQAYITTQGSAGALVHTPEKTYDIPPAKTRRVVDRTGCGDAFRAGLIYGIQHNYDWLTIGRMGNLMGALKVEHPGTQNQRFDFAEFNDQFKQYFGYAL

SEQ ID NO: 1341 - DNA, 963 bp, synthetic construct
  misc_feature 1..963: note = variant of adenosine kinase from Xanthemonas campestris
  source 1..963: mol_type = other DNA
atgcaccatcatcaccatcacgggggctccggcatgagtgcactgatttgcggttctttagcgtatgataccatcatggtgtttccggaccagttcaagaaccatattctgcccgatcgtgttcaccgcctcaatgtcagctttcttgtaccacgcatgcgtcgtgaatttggaggctgtgccggcaacattgcgtacaatctgcatctgttgggtggtgctccgatcgtaatggctacggtgggccaagatttcggtccgtatcgcgagcacttcgaaactctgggcattgacttatcccgcgtcaagatcatcgatgatctgagtacaccgcaggccttcattaccaccgacatggatcataaccagattacggcgtttcacggcggcgcaatgatgcgttcgtacgaaaatcacgttcgtgatgtgccgggtgttaccttgggcctcgtaggtcctgatggacgcgagggcatgatccaaaatgccgaagaatttgctgctggtggcattccgttcatttttgacccaggtcaggcagtgccgctgttcaacggccccgaactgcgcgagtttatcgaacaggcggactatgtggtggtcaacgattacgaaagcaatcttcttcaagcccgtactggctggaacgagcaggacattgtttcacgcgtgcaggcgtatatcaccacgcaaggttcggctggagccctggtacatctgccggagaagacctacgatattccgccggctaaaacccgtcgtgtcgttgatccaactggttgcggcgacgcgtttcgcgccggcctgatctatggtattcagcataattatgattggttgaccattggccgcatgggaaacttaatgggtgcgctgaaagtggaacaccctggcacccaaaatcagcgtttcgattttgccgaattcaacgaccagttcaaacaatattttggctacgcgctc

SEQ ID NO: 1342 - protein, 321 aa, synthetic construct
  REGION 1..321: note = variant of adenosine kinase from Xanthemonas campestris
MHHHHHHGGSGMSALICGSLAYDTIMVFPDQFKNHILPDRVHRLNVSFLVPRMRREFGGCAGNIAYNLHLLGGAPIVMATVGQDFGPYREHFETLGIDLSRVKIIDDLSTPQAFITTDMDHNQITAFHGGAMMRSYENHVRDVPGVTLGLVGPDGREGMIQNAEEFAAGGIPFIFDPGQAVPLFNGPELREFIEQADYVVVNDYESNLLQARTGWNEQDIVSRVQAYITTQGSAGALVHLPEKTYDIPPAKTRRVVDPTGCGDAFRAGLIYGIQHNYDWLTIGRMGNLMGALKVEHPGTQNQRFDFAEFNDQFKQYFGYAL

SEQ ID NO: 1343 - DNA, 963 bp, synthetic construct
  misc_feature 1..963: note = variant of adenosine kinase from Xanthemonas campestris
  source 1..963: mol_type = other DNA
atgcaccatcatcaccatcacgggggctccggcatgagtgcactgatttgcggttctttagcgtatgataccatcatggtgtttccggaccagttcaagaaccatattctgcccgatcgtgttcaccgcctcaatgtcagctttcttgtaccacgcatgcgtcgtgaatttggaggctgtgccggcaacattgcgtacaatctgcatctgttgggtggtgctccgatcgtaatggctacggtgggccaagatttcggtccgtatcgcgagcacttcgaaactctgggcattgacttatcccgcgtcaagcttatcgatgatctgagtacaccgcaggccttcattaccaccgacatggatcataaccagattacggcgtttcacggcggcgcaatgatgcgttcgtacgaaaatcacgttcgtgatgtgccgggtgttaccttgggcctcgtaggtcctgatggacgcgagggcatgatccaaaatgccgaagaatttgctgctggtggcattccgttcatttttgacccaggtcaggcagtgccgctgttcaacggccccgaactgcgcgagtttatcgaacaggcggactatgtggtggtcaacgattacgaaagcaatcttcttcaagcccgtactggctggaacgagcaggacattgtttcacgcgtgcaggcgtatatcaccacgcaaggttcggctggagccctggtacatacaccggagaagacctacgatattccgccggctaaaacccgtcgtgtcgttgatccaactggttgcggcgacgcgtttcgcgccggcctgatctatggtattcagcataattatgattggttgaccattggccgcatgggaaacttaatgggtgcgctgaaagtggaacaccctggcacccaaaatcagcgtttcgattttgccgaattcaacgaccagttcaaacaatattttggctacgcgctc

SEQ ID NO: 1344 - protein, 321 aa, synthetic construct
  REGION 1..321: note = variant of adenosine kinase from Xanthemonas campestris
MHHHHHHGGSGMSALICGSLAYDTIMVFPDQFKNHILPDRVHRLNVSFLVPRMRREFGGCAGNIAYNLHLLGGAPIVMATVGQDFGPYREHFETLGIDLSRVKLIDDLSTPQAFITTDMDHNQITAFHGGAMMRSYENHVRDVPGVTLGLVGPDGREGMIQNAEEFAAGGIPFIFDPGQAVPLFNGPELREFIEQADYVVVNDYESNLLQARTGWNEQDIVSRVQAYITTQGSAGALVHTPEKTYDIPPAKTRRVVDPTGCGDAFRAGLIYGIQHNYDWLTIGRMGNLMGALKVEHPGTQNQRFDFAEFNDQFKQYFGYAL

SEQ ID NO: 1345 - DNA, 963 bp, synthetic construct
  misc_feature 1..963: note = variant of adenosine kinase from Xanthemonas campestris
  source 1..963: mol_type = other DNA
atgcaccatcatcaccatcacgggggctccggcatgagtgcactgatttgcggttctttagcgtatgatgtgatcatggtgtttccggaccagttcaagaaccatattctgcccgatcgtgttcaccgcctcaatgtcagctttcttgtaccggacatgcgtcgtgaatttggaggctgtgccggcaacattgcgtacaatctgcatctgttgggtggtgctccgatcgtaatggctacggtgggccaagatttcggtccgtatcgcgagcacttcgaaactctgggcattgacttatcccgcgtcaagatcatcgatgatctgagtacaccgcaggccttcattaccaccgacatggatcataaccagattacggcgtttcacggcggcgcaatgatgcgttcgtacgaaaatcacgttcgtgatgtgccgggtgttaccttgggcctcgtaggtcctgatggacgcgagggcatgatccaaaatgccgaagaatttgctgctatgggcattccgttcatttttgacccaggtcaggcagtgccgctgttcaacggccccgaactgcgcgagtttatcgaacaggcggactatgtggtggtcaacgattacgaaagcaatcttcttcaagcccgtactggctggaacgagcaggacattgtttcacgcgtgcaggcgtatatcaccacgcaaggttcggctggagccctggtacatacaccggagaagacctacgatattccgccggctaaaacccgtcgtgtcgttgatccaactggttgcggcgacgcgtttcgcgccggcctgatctatggtattcagcataattatgattggttgaccattggccgcatgggaaacttaatgggtgcgctgaaagtggaacaccctggcacccaaaatcagcgtttcgattttgccgaattcaacgaccagttcaaacaatattttggctacgcgctc

SEQ ID NO: 1346 - protein, 321 aa, synthetic construct
  REGION 1..321: note = variant of adenosine kinase from Xanthemonas campestris
MHHHHHHGGSGMSALICGSLAYDVIMVFPDQFKNHILPDRVHRLNVSFLVPDMRREFGGCAGNIAYNLHLLGGAPIVMATVGQDFGPYREHFETLGIDLSRVKIIDDLSTPQAFITTDMDHNQITAFHGGAMMRSYENHVRDVPGVTLGLVGPDGREGMIQNAEEFAAMGIPFIFDPGQAVPLFNGPELREFIEQADYVVVNDYESNLLQARTGWNEQDIVSRVQAYITTQGSAGALVHTPEKTYDIPPAKTRRVVDPTGCGDAFRAGLIYGIQHNYDWLTIGRMGNLMGALKVEHPGTQNQRFDFAEFNDQFKQYFGYAL

SEQ ID NO: 1347 - DNA, 963 bp, synthetic construct
  misc_feature 1..963: note = variant of adenosine kinase from Xanthemonas campestris
  source 1..963: mol_type = other DNA
atgcaccatcatcaccatcacgggggctccggcatgagtgcactgatttgcggttctttagcgtatgatattatcatggtgtttccggaccagttcaagaaccatattctgcccgatcgtgttcaccgcctcaatgtcagctttcttgtaccggacatgcgtcgtgaatttggaggctgtgccggcaacattgcgtacaatctgcatctgttgggtggtgctccgatcgtaatggctacggtgggccaagatttcggtccgtatcgcgagcacttcgaaactctgggcattgacttatcccgcgtcaagatcatcgatgatctgagtacaccgcaggccttcattaccaccgacatggatcataaccagattacggcgtttcacggcggcgcaatgatgcgttcgtacgaaaatcacgttcgtgatgtgccgggtgttaccttgggcctcgtaggtcctgatggacgcgagggcatgatccaaaatgccgaagaatttgctgctatgggcattccgttcatttttgacccaggtcaggcagtgccgctgttcaacggccccgaactgcgcgagtttatcgaacaggcggactatgtggtggtcaacgattacgaaagcaatcttcttcaagcccgtactggctggaacgagcaggacattgtttcacgcgtgcaggcgtatatcaccacgcaaggttcggctggagccctggtacatacaccggagaagacctacgatattccgccggctaaaacccgtcgtgtcgttgatccaactggttgcggcgacgcgtttcgcgccggcctgatctatggtattcagcataattatgattggttgaccattggccgcatgggaaacttaatgggtgcgctgaaagtggaacaccctggcacccaaaatcagcgtttcgattttgccgaattcaacgaccagttcaaacaatattttggctacgcgctc

SEQ ID NO: 1348 - protein, 321 aa, synthetic construct
  REGION 1..321: note = variant of adenosine kinase from Xanthemonas campestris
MHHHHHHGGSGMSALICGSLAYDIIMVFPDQFKNHILPDRVHRLNVSFLVPDMRREFGGCAGNIAYNLHLLGGAPIVMATVGQDFGPYREHFETLGIDLSRVKIIDDLSTPQAFITTDMDHNQITAFHGGAMMRSYENHVRDVPGVTLGLVGPDGREGMIQNAEEFAAMGIPFIFDPGQAVPLFNGPELREFIEQADYVVVNDYESNLLQARTGWNEQDIVSRVQAYITTQGSAGALVHTPEKTYDIPPAKTRRVVDPTGCGDAFRAGLIYGIQHNYDWLTIGRMGNLMGALKVEHPGTQNQRFDFAEFNDQFKQYFGYAL

SEQ ID NO: 1349 - DNA, 963 bp, synthetic construct
  misc_feature 1..963: note = variant of adenosine kinase from Xanthemonas campestris
  source 1..963: mol_type = other DNA
atgcaccatcatcaccatcacgggggctccggcatgagtgcactgatttgcggttctttagcgtatgataccatcatggtgtttccggaccagttcaagaaccatattctgcccgatcgtgttcaccgcctcaatgtcagctttcttgtaccggacatgcgtcgtgaatttggaggctgtgccggcaacattgcgtacaatctgcatctgttgggtggtgctccgatcgtaatggctacggtgggccaagatttcggtccgtatcgcgagcacttcgaaactctgggcattgacttatcccgcgtcaagatcatcgatgatctgagtacaccgcaggccttcattaccaccgacatggatcataaccagattacggcgtttcacggcggcgcaatgatgcgttcgtacgaaaatcacgttcgtgatgtgccgggtgttaccttgggcctcgtaggtcctgatggacgcgagggcatgatccaaaatgccgaagaatttgctgctatgggcattccgttcatttttgacccaggtcaggcagtgccgctgttcaacggccccgaactgcgcgagtttatcgaacaggcggactatgtggtggtcaacgattacgaaagcaatcttcttcaagcccgtactggctggaacgagcaggacattgtttcacgcgtgcaggcgtatatcaccacgcaaggttcgaaaggatgtctggtacatacaccggagaagacctacgatattccgccggctaaaacccgtcgtgtcgttgatccaactggttgcggcgacgcgtttcgcgccggcctgatctatggtattcagcataattatgattggttgaccattggccgcatgggaaacttaatgggtgcgctgaaagtggaacaccctggcacccaaaatcagcgtttcgattttgccgaattcaacgaccagttcaaacaatattttggctacgcgctc

SEQ ID NO: 1350 - protein, 321 aa, synthetic construct
  REGION 1..321: note = variant of adenosine kinase from Xanthemonas campestris
MHHHHHHGGSGMSALICGSLAYDTIMVFPDQFKNHILPDRVHRLNVSFLVPDMRREFGGCAGNIAYNLHLLGGAPIVMATVGQDFGPYREHFETLGIDLSRVKIIDDLSTPQAFITTDMDHNQITAFHGGAMMRSYENHVRDVPGVTLGLVGPDGREGMIQNAEEFAAMGIPFIFDPGQAVPLFNGPELREFIEQADYVVVNDYESNLLQARTGWNEQDIVSRVQAYITTQGSKGCLVHTPEKTYDIPPAKTRRVVDPTGCGDAFRAGLIYGIQHNYDWLTIGRMGNLMGALKVEHPGTQNQRFDFAEFNDQFKQYFGYAL

SEQ ID NO: 1351 - DNA, 963 bp, synthetic construct
  misc_feature 1..963: note = variant of adenosine kinase from Xanthemonas campestris
  source 1..963: mol_type = other DNA
atgcaccatcatcaccatcacgggggctccggcatgagtgcactgatttgcggttctttagcgtatgataatatcatggtgtttccggaccagttcaagaaccatattctgcccgatcgtgttcaccgcctcaatgtcagctttcttgtaccggacatgcgtcgtgaatttggaggctgtgccggcaacattgcgtacaatctgcatctgttgggtggtgctccgatcgtaatggctacggtgggccaagatttcggtccgtatcgcgagcacttcgaaactctgggcattgacttatcccgcgtcaagatcatcgatgatctgagtacaccgcaggccttcattaccaccgacatggatcataaccagattacggcgtttcacggcggcgcaatgatgcgttcgtacgaaaatcacgttcgtgatgtgccgggtgttaccttgggcctcgtaggtcctgatggacgcgagggcatgatccaaaatgccgaagaatttgctgctatgggcattccgttcatttttgacccaggtcaggcagtgccgctgttcaacggccccgaactgcgcgagtttatcgaacaggcggactatgtggtggtcaacgattacgaaagcaatcttcttcaagcccgtactggctggaacgagcaggacattgtttcacgcgtgcaggcgtatatcaccacgcaaggttcggctggagccctggtacatacaccggagaagacctacgatattccgccggctaaaacccgtcgtgtcgttgatccaactggttgcggcgacgcgtttcgcgccggcctgatctatggtattcagcataattatgattggttgaccattggccgcatgggaaacttaatgggtgcgctgaaagtggaacaccctggcacccaaaatcagcgtttcgattttgccgaattcaacgaccagttcaaacaatattttggctacgcgctc

SEQ ID NO: 1352 - protein, 321 aa, synthetic construct
  REGION 1..321: note = variant of adenosine kinase from Xanthemonas campestris
MHHHHHHGGSGMSALICGSLAYDNIMVFPDQFKNHILPDRVHRLNVSFLVPDMRREFGGCAGNIAYNLHLLGGAPIVMATVGQDFGPYREHFETLGIDLSRVKIIDDLSTPQAFITTDMDHNQITAFHGGAMMRSYENHVRDVPGVTLGLVGPDGREGMIQNAEEFAAMGIPFIFDPGQAVPLFNGPELREFIEQADYVVVNDYESNLLQARTGWNEQDIVSRVQAYITTQGSAGALVHTPEKTYDIPPAKTRRVVDPTGCGDAFRAGLIYGIQHNYDWLTIGRMGNLMGALKVEHPGTQNQRFDFAEFNDQFKQYFGYAL

SEQ ID NO: 1353 - DNA, 963 bp, synthetic construct
  misc_feature 1..963: note = variant of adenosine kinase from Xanthemonas campestris
  source 1..963: mol_type = other DNA
atgcaccatcatcaccatcacgggggctccggcatgagtgcactgatttgcggttctttagcgtatgataccatcatggtgtttccggaccagttcaagaaccatattctgcccgatcgtgttcaccgcctcaatgtcagctttcttgtaccggacatgcgtcgtgaatttggaggctgtgccggcaacattgcgtacaatctgcatctgttgggtggtgctccgatcgtaatggctacggtgggccaagatttcggtccgtatcgcgagcacttcgaaactctgggcattgacttatcccgcgtcaagatcatcgatgatctgagtacaccgcaggccttcattaccaccgacatggatcataaccagattacggcgtttcacggcggcgcaatgatgcgttcgtacgaaaatcacgttcgtgatgtgccgggtgttaccttgggcctcgtaggtcctgatggacgcgagggcatgatccaaaatgccgaagaatttgctgctatgggcattccgttcatttttgacccaggtcaggcagtgccgctgttcaacggccccgaactgcgcgagtttatcgaacaggcggactatgtggtggtcaacgattacgaaagcaatcttcttcaagcccgtactggctggaacgagcaggacattgtttcacgcgtgcaggcgtatatcaccacgcaaggttcggctggagccctggtacatacaccggagaagacctacgatattccgccggcacacgctcgtcgtgtcgttgatccaactggttgcggcgacgcgtttcgcgccggcctgatctatggtattcagcataattatgattggttgaccattggccgcatgggaaacttaatgggtgcgctgaaagtggaacaccctggcacccaaaatcagcgtttcgattttgccgaattcaacgaccagttcaaacaatattttggctacgcgctc

SEQ ID NO: 1354 - protein, 321 aa, synthetic construct
  REGION 1..321: note = variant of adenosine kinase from Xanthemonas campestris
MHHHHHHGGSGMSALICGSLAYDTIMVFPDQFKNHILPDRVHRLNVSFLVPDMRREFGGCAGNIAYNLHLLGGAPIVMATVGQDFGPYREHFETLGIDLSRVKIIDDLSTPQAFITTDMDHNQITAFHGGAMMRSYENHVRDVPGVTLGLVGPDGREGMIQNAEEFAAMGIPFIFDPGQAVPLFNGPELREFIEQADYVVVNDYESNLLQARTGWNEQDIVSRVQAYITTQGSAGALVHTPEKTYDIPPAHARRVVDPTGCGDAFRAGLIYGIQHNYDWLTIGRMGNLMGALKVEHPGTQNQRFDFAEFNDQFKQYFGYAL

SEQ ID NO: 1355 - DNA, 963 bp, synthetic construct
  misc_feature 1..963: note = variant of adenosine kinase from Xanthemonas campestris
  source 1..963: mol_type = other DNA
atgcaccatcatcaccatcacgggggctccggcatgagtgcactgatttgcggttctttagcgtatgataccatcatggtgtttccggaccagttcaagaaccatattctgcccgatcgtgttcaccgcctcaatgtcagctttcttgtaccggacatgcgtcgtgaatttggaggctgtgccggcaacattgcgtacaatctgcatctgttgggtggtgctccgatcgtaatggctacggtgggccaagatttcggtccgtatcgcgagcacttcgaaactctgggcattgacttatcccgcgtcaagatcatcgatgatctgagtacaccgcaggccttcattaccaccgacagtgatcataaccagattacggcgtttcacggcggcgcaatgatgcgttcgtacgaaaatcacgttcgtgatgtgccgggtgttaccttgggcctcgtaggtcctgatggacgcgagggcatgatccaaaatgccgaagaatttgctgctatgggcattccgttcatttttgacccaggtcaggcagtgccgctgttcaacggccccgaactgcgcgagtttatcgaacaggcggactatgtggtggtcaacgattacgaaagcaatcttcttcaagcccgtactggctggaacgagcaggacattgtttcacgcgtgcaggcgtatatcaccacgcaaggttcggctggagccctggtacatacaccggagaagacctacgatattccgccggctaaaacccgtcgtgtcgttgatccaactggttgcggcgacgcgtttcgcgccggcctgatctatggtattcagcataattatgattggttgaccattggccgcatgggaaacttaatgggtgcgctgaaagtggaacaccctggcacccaaaatcagcgtttcgattttgccgaattcaacgaccagttcaaacaatattttggctacgcgctc

SEQ ID NO: 1356 - protein, 321 aa, synthetic construct
  REGION 1..321: note = variant of adenosine kinase from Xanthemonas campestris
MHHHHHHGGSGMSALICGSLAYDTIMVFPDQFKNHILPDRVHRLNVSFLVPDMRREFGGCAGNIAYNLHLLGGAPIVMATVGQDFGPYREHFETLGIDLSRVKIIDDLSTPQAFITTDSDHNQITAFHGGAMMRSYENHVRDVPGVTLGLVGPDGREGMIQNAEEFAAMGIPFIFDPGQAVPLFNGPELREFIEQADYVVVNDYESNLLQARTGWNEQDIVSRVQAYITTQGSAGALVHTPEKTYDIPPAKTRRVVDPTGCGDAFRAGLIYGIQHNYDWLTIGRMGNLMGALKVEHPGTQNQRFDFAEFNDQFKQYFGYAL

SEQ ID NO: 1357 - DNA, 963 bp, synthetic construct
  misc_feature 1..963: note = variant of adenosine kinase from Xanthemonas campestris
  source 1..963: mol_type = other DNA
atgcaccatcatcaccatcacgggggctccggcatgagtgcactgatttgcggttctttagcgtatgataccatcatggtgtttccggaccagttcaagaaccatattctgcccgatcgtgttcaccgcctcaatgtcagctttcttgtaccggacatgcgtcgtgaatttggaggctgtgccggcaacattgcgtacaatctgcatctgttgggtggtgctccgatcgtaatggctacggtgggccaagatttcggtccgtatcgcgagcacttcgaaactctgggcattgacttatcccgcgtcaagatcatcgatgatctgagtacaccgcaggccttcattaccaccgacactgatcataaccagattacggcgtttcacggcggcgcaatgatgcgttcgtacgaaaatcacgttcgtgatgtgccgggtgttaccttgggcctcgtaggtcctgatggacgcgagggcatgatccaaaatgccgaagaatttgctgctatgggcattccgttcatttttgacccaggtcaggcagtgccgctgttcaacggccccgaactgcgcgagtttatcgaacaggcggactatgtggtggtcaacgattacgaaagcaatcttcttcaagcccgtactggctggaacgagcaggacattgtttcacgcgtgcaggcgtatatcaccacgcaaggttcggctggagccctggtacatacaccggagaagacctacgatattccgccggctaaaacccgtcgtgtcgttgatccaactggttgcggcgacgcgtttcgcgccggcctgatctatggtattcagcataattatgattggttgaccattggccgcatgggaaacttaatgggtgcgctgaaagtggaacaccctggcacccaaaatcagcgtttcgattttgccgaattcaacgaccagttcaaacaatattttggctacgcgctc

SEQ ID NO: 1358 - protein, 321 aa, synthetic construct
  REGION 1..321: note = variant of adenosine kinase from Xanthemonas campestris
MHHHHHHGGSGMSALICGSLAYDTIMVFPDQFKNHILPDRVHRLNVSFLVPDMRREFGGCAGNIAYNLHLLGGAPIVMATVGQDFGPYREHFETLGIDLSRVKIIDDLSTPQAFITTDTDHNQITAFHGGAMMRSYENHVRDVPGVTLGLVGPDGREGMIQNAEEFAAMGIPFIFDPGQAVPLFNGPELREFIEQADYVVVNDYESNLLQARTGWNEQDIVSRVQAYITTQGSAGALVHTPEKTYDIPPAKTRRVVDPTGCGDAFRAGLIYGIQHNYDWLTIGRMGNLMGALKVEHPGTQNQRFDFAEFNDQFKQYFGYAL

SEQ ID NO: 1359 - DNA, 963 bp, synthetic construct
  misc_feature 1..963: note = variant of adenosine kinase from Xanthemonas campestris
  source 1..963: mol_type = other DNA
atgcaccatcatcaccatcacgggggctccggcatgagtgcactgatttgcggttctttagcgtatgataccatcatggtgtttccggaccagttcaagaaccatattctgcccgatcgtgttcaccgcctcaatgtcagctttcttgtaccggacatgcgtcgtgaatttggaggctgtgccggcaacattgcgtacaatctgcatctgttgggtggtgctccgatcgtaatggctacggtgggccaagatttcggtccgtatcgcgagcacttcgaaactctgggcattgacttatcccgcgtcaagatcatcgatgatctgagtacaccgcaggccttcattaccaccgacatggatcataaccagattacggcgtttcacggcggcgcaatgatgcgttcgtacgaaaatcacgttcgtgatgtgccgggtgttaccttgggcctcgtaggtcctgatggacgcgagggcatgatccaaaatgccgaagaatttgctgctatgggcattccgttcatttttgacccaggtcaggcagtgccgctgttcaacggccccgaactgcgcgagtttatcgaacaggcggactatgtggtggtcaacgattacgaaagcaatcttcttcaagcccgtactggctggaacgagcaggacattgtttcacgcgtgcaggcgtatatcaccacgcaaggttcgaaaggagccctggtacatacaccggagaagacctacgatattccgccggctaaaacccgtcgtgtcgttgatccaactggttgcggcgacgcgtttcgcgccggcctgatctatggtattcagcataattatgattggttgaccattggccgcatgggaaacttaatgggtgcgctgaaagtggaacaccctggcacccaaaatcagcgtttcgattttgccgaattcaacgaccagttcaaacaatattttggctacgcgctc

SEQ ID NO: 1360 - protein, 321 aa, synthetic construct
  REGION 1..321: note = variant of adenosine kinase from Xanthemonas campestris
MHHHHHHGGSGMSALICGSLAYDTIMVFPDQFKNHILPDRVHRLNVSFLVPDMRREFGGCAGNIAYNLHLLGGAPIVMATVGQDFGPYREHFETLGIDLSRVKIIDDLSTPQAFITTDMDHNQITAFHGGAMMRSYENHVRDVPGVTLGLVGPDGREGMIQNAEEFAAMGIPFIFDPGQAVPLFNGPELREFIEQADYVVVNDYESNLLQARTGWNEQDIVSRVQAYITTQGSKGALVHTPEKTYDIPPAKTRRVVDPTGCGDAFRAGLIYGIQHNYDWLTIGRMGNLMGALKVEHPGTQNQRFDFAEFNDQFKQYFGYAL

SEQ ID NO: 1361 - DNA, 963 bp, synthetic construct
  misc_feature 1..963: note = variant of adenosine kinase from Xanthemonas campestris
  source 1..963: mol_type = other DNA
atgcaccatcatcaccatcacgggggctccggcatgagtgcactgatttgcggttctttagcgtatgataccatcatggtgtttccggaccagttcaagaaccatattctgcccgatcgtgttcaccgcctcaatgtcagctttcttgtaccggacatgcgtcgtgaatttggaggctgtgccggcaacattgcgtacaatctgcatctgttgggtggtgctccgatcgtaatggctacggtgggccaagatttcggtccgtatcgcgagcacttcgaaactctgggcattgacttatcccgcgtcaagatcatcgatgatctgagtacaccgcaggccttcattaccaccgacatggatcataaccagattacggcgtttcacggcggcgcaatgatgcgttcgtacgaaaatcacgttcgtgatgtgccgggtgttaccttgggcctcgtaggtcctgatggacgcgagggcatgatccaaaatgccgaagaatttgctgctatgggcattccgttcatttttgacccaggtcaggcagtgccgctgttcaacggccccgaactgcgcgagtttatcgaacaggcggactatgtggtggtcaacgattacgaaagcaatcttcttcaagcccgtactggctggaacgagcaggacattgtttcacgcgtgcaggcgtatatcaccacgcaaggttcgaaaggaagtctggtacatacaccggagaagacctacgatattccgccggctaaaacccgtcgtgtcgttgatccaactggttgcggcgacgcgtttcgcgccggcctgatctatggtattcagcataattatgattggttgaccattggccgcatgggaaacttaatgggtgcgctgaaagtggaacaccctggcacccaaaatcagcgtttcgattttgccgaattcaacgaccagttcaaacaatattttggctacgcgctc

SEQ ID NO: 1362 - protein, 321 aa, synthetic construct
  REGION 1..321: note = variant of adenosine kinase from Xanthemonas campestris
MHHHHHHGGSGMSALICGSLAYDTIMVFPDQFKNHILPDRVHRLNVSFLVPDMRREFGGCAGNIAYNLHLLGGAPIVMATVGQDFGPYREHFETLGIDLSRVKIIDDLSTPQAFITTDMDHNQITAFHGGAMMRSYENHVRDVPGVTLGLVGPDGREGMIQNAEEFAAMGIPFIFDPGQAVPLFNGPELREFIEQADYVVVNDYESNLLQARTGWNEQDIVSRVQAYITTQGSKGSLVHTPEKTYDIPPAKTRRVVDPTGCGDAFRAGLIYGIQHNYDWLTIGRMGNLMGALKVEHPGTQNQRFDFAEFNDQFKQYFGYAL

SEQ ID NO: 1363 - DNA, 963 bp, synthetic construct
  misc_feature 1..963: note = variant of adenosine kinase from Xanthemonas campestris
  source 1..963: mol_type = other DNA
atgcaccatcatcaccatcacgggggctccggcatgagtgcactgatttgcggttctttagcgtatgataccatcatggtgtttccggaccagttcaagaaccatattctgcccgatcgtgttcaccgcctcaatgtcagctttcttgtaccggacatgcgtcgtgaatttggaggctgtgccggcaacattgcgtacaatctgcatctgttgggtggtgctccgatcgtaatggctacggtgggccaagatttcggtccgtatcgcgagcacttcgaaactctgggcattgacttatcccgcgtcaagatcatcgatgatctgagtacaccgcaggccttcattaccaccgacatggatcataaccagattacggcgtttcacggcggcgcaatgatgcgttcgtacgaaaatcacgttcgtgatgtgccgggtgttaccttgggcctcgtaggtcctgatggacgcgagggcatgatccaaaatgccgaagaatttgctgctatgggcattccgttcatttttgacccaggtcaggcagtgccgctgttcaacggccccgaactgcgcgagtttatcgaacaggcggactatgtggtggtcaacgattacgaaagcaatcttcttcaagcccgtactggctggaacgagcaggacattgtttcacgcgtgcaggcgtatatcaccacgctgggttcgaaaggagccctggtacatacaccggagaagacctacgatattccgccggctaaaacccgtcgtgtcgttgatccaactggttgcggcgacgcgtttcgcgccggcctgatctatggtattcagcataattatgattggttgaccattggccgcatgggaaacttaatgggtgcgctgaaagtggaacaccctggcacccaaaatcagcgtttcgattttgccgaattcaacgaccagttcaaacaatattttggctacgcgctc

SEQ ID NO: 1364 - protein, 321 aa, synthetic construct
  REGION 1..321: note = variant of adenosine kinase from Xanthemonas campestris
MHHHHHHGGSGMSALICGSLAYDTIMVFPDQFKNHILPDRVHRLNVSFLVPDMRREFGGCAGNIAYNLHLLGGAPIVMATVGQDFGPYREHFETLGIDLSRVKIIDDLSTPQAFITTDMDHNQITAFHGGAMMRSYENHVRDVPGVTLGLVGPDGREGMIQNAEEFAAMGIPFIFDPGQAVPLFNGPELREFIEQADYVVVNDYESNLLQARTGWNEQDIVSRVQAYITTLGSKGALVHTPEKTYDIPPAKTRRVVDPTGCGDAFRAGLIYGIQHNYDWLTIGRMGNLMGALKVEHPGTQNQRFDFAEFNDQFKQYFGYAL

SEQ ID NO: 1365 - DNA, 963 bp, synthetic construct
  misc_feature 1..963: note = variant of adenosine kinase from Xanthemonas campestris
  source 1..963: mol_type = other DNA
atgcatcatcaccatcaccatggggggtccggtatgagtgcactcatttgcggttctttagcgtatgataacatcatggtgtttccggaccagttcaagaaccatattctgcccgatcgtgttcaccgcctcaatgtcagctttcttgtaccggacatgcgtcgtgaatttggaggctgtgccggcaacattgcgtacaatctgcatctgttgggtggtgctccgatcgtaatggctacggtgggccaagatttcggtccgtatcgcgagcacttcgaaactctgggcattgacttatcccgcgtcaagatcatcgatgatctgagtacaccgcaggccttcattaccaccgacatggatcataaccagattacggcgtttcacggcggcgcaatgatgcgttcgtacgaaaatcacgttcgtgatgtgccgggtgttaccttgggcctcgtaggtcctgatggacgcgagggcatgatccaaaatgccgaagaatttgctgctatgggcattccgttcatttttgacccaggtcaggcagtgccgctgttcaacggccccgaactgcgcgagtttatcgaacaggcggactatgtggtggtcaacgattacgaaagcaatcttcttcaagcccgtactggctggaacgagcaggacattgtttcacgcgtgcaggcgtatatcaccacgcaaggttcggctggagccctggtacatacaccggagaagacctacgatattccgccggctaaaacccgtcgtgtcgttgatccaactggttgcggcgacgcgtttcgcgccggcctgatctatggtattcagcataattatgattggttgaccattggccgcatgggaaacttaatgggtgcgctgaaagtggaacaccctggcacccaaaatcagcgtttcgattttgccgaattcaacgaccagttcaaacaatattttggctacgcgctc

SEQ ID NO: 1366 - protein, 321 aa, synthetic construct; identical to SEQ ID NO: 1352
  REGION 1..321: note = variant of adenosine kinase from Xanthemonas campestris

SEQ ID NO: 1367 - DNA, 963 bp, synthetic construct
  misc_feature 1..963: note = variant of adenosine kinase from Xanthemonas campestris
  source 1..963: mol_type = other DNA
atgcatcatcaccatcaccatggggggtccggtatgagtgcactcatttgcggttctttagcgtatgataacatcatggtgtttccggaccagttcaagaaccatattctgcccgatcgtgttcaccgcctcaatgtcagctttcttgtaccggacatgcgtcgtgaatttggaggctgtgccggcaacattgcgtacaatctgcatctgttgggtggtgctccgatcgtaatggctacggtgggccaagatttcggtccgtatcgcgagcacttcgaaactctgggcattgacttatcccgcgtcaagatcatcgatgatctgagtacaccgcaggccttcattaccaccgacatggatcataaccagattacggcgtttcacggcggcgcaatgatgcgttcgtacgaaaatcacgttcgtgatgtgccgggtgttaccttgggcctcgtaggtcctgatggacgcgagggcatgatccaaaatgccgaagaatttgctgctatgggcattccgttcatttttgacccaggtcaggcagtggggctgttcaacggccccgaactgcgcgagtttatcgaacaggcggactatgtggtggtcaacgattacgaaagcaatcttcttcaagcccgtactggctggaacgagcaggacattgtttcacgcgtgcaggcgtatatcaccacgcaaggttcggctggagccctggtacatacaccggagaagacctacgatattccgccggctaaaacccgtcgtgtcgttgatccaactggttgcggcgacgcgtttcgcgccggcctgatctatggtattcagcataattatgattggttgaccattggccgcatgggaaacttaatgggtgcgctgaaagtggaacaccctggcacccaaaatcagcgtttcgattttgccgaattcaacgaccagttcaaacaatattttggctacgcgctc

SEQ ID NO: 1368 - protein, 321 aa, synthetic construct
  REGION 1..321: note = variant of adenosine kinase from Xanthemonas campestris
MHHHHHHGGSGMSALICGSLAYDNIMVFPDQFKNHILPDRVHRLNVSFLVPDMRREFGGCAGNIAYNLHLLGGAPIVMATVGQDFGPYREHFETLGIDLSRVKIIDDLSTPQAFITTDMDHNQITAFHGGAMMRSYENHVRDVPGVTLGLVGPDGREGMIQNAEEFAAMGIPFIFDPGQAVGLFNGPELREFIEQADYVVVNDYESNLLQARTGWNEQDIVSRVQAYITTQGSAGALVHTPEKTYDIPPAKTRRVVDPTGCGDAFRAGLIYGIQHNYDWLTIGRMGNLMGALKVEHPGTQNQRFDFAEFNDQFKQYFGYAL

SEQ ID NO: 1369 - DNA, 963 bp, synthetic construct
  misc_feature 1..963: note = variant of adenosine kinase from Xanthemonas campestris
  source 1..963: mol_type = other DNA
atgcatcatcaccatcaccatggggggtccggtatgagtgcactcatttgcggttctttagcgtatgataacatcatggtgtttccggaccagttcaagaaccatattctgcccgatcgtgttcaccgcctcaatgtcagctttcttgtaccggacatgcgtcgtgaatttggaggctgtgccggcaacattgcgtacaatctgcatctgttgggtggtgctccgatcgtaatggctacggtgggccaagatttcggtccgtatcgcgagcacttcgaaactctgggcattgacttatcccgcgtcaagatcatcgatgatctgagtacaccgcaggccttcattaccaccgacatggatcagaaccagattacggcgtttcacggcggcgcaatgatgcgttcgtacgaaaatcacgttcgtgatgtgccgggtgttaccttgggcctcgtaggtcctgatggacgcgagggcatgatccaaaatgccgaagaatttgctgctatgggcattccgttcatttttgacccaggtcaggcagtgccgctgttcaacggccccgaactgcgcgagtttatcgaacaggcggactatgtggtggtcaacgattacgaaagcaatcttcttcaagcccgtactggctggaacgagcaggacattgtttcacgcgtgcaggcgtatatcaccacgcaaggttcggctggagccctggtacatacaccggagaagacctacgatattccgccggctaaaacccgtcgtgtcgttgatccaactggttgcggcgacgcgtttcgcgccggcctgatctatggtattcagcataattatgattggttgaccattggccgcatgggaaacttaatgggtgcgctgaaagtggaacaccctggcacccaaaatcagcgtttcgattttgccgaattcaacgaccagttcaaacaatattttggctacgcgctc

SEQ ID NO: 1370 - protein, 321 aa, synthetic construct
  REGION 1..321: note = variant of adenosine kinase from Xanthemonas campestris
MHHHHHHGGSGMSALICGSLAYDNIMVFPDQFKNHILPDRVHRLNVSFLVPDMRREFGGCAGNIAYNLHLLGGAPIVMATVGQDFGPYREHFETLGIDLSRVKIIDDLSTPQAFITTDMDQNQITAFHGGAMMRSYENHVRDVPGVTLGLVGPDGREGMIQNAEEFAAMGIPFIFDPGQAVPLFNGPELREFIEQADYVVVNDYESNLLQARTGWNEQDIVSRVQAYITTQGSAGALVHTPEKTYDIPPAKTRRVVDPTGCGDAFRAGLIYGIQHNYDWLTIGRMGNLMGALKVEHPGTQNQRFDFAEFNDQFKQYFGYAL

SEQ ID NO: 1371 - DNA, 963 bp, synthetic construct
  misc_feature 1..963: note = variant of adenosine kinase from Xanthemonas campestris
  source 1..963: mol_type = other DNA
atgcatcatcaccatcaccatggggggtccggtatgagtgcactcatttgcggttctttagcgtatgataacatcatggtgtttccggaccagttcaagaaccatattctgcccgatcgtgttcaccgcctcaatgtcagctttcttgtaccggacatgcgtcgtgaatttggaggctgtgccggcaacattgcgtacaatctgcatctgttgggtggtgctccgatcgtaatggctacggtgggccaagatttcggtccgtatcgcgagcacttcgaaactctgggcattgacttatcccgcgtcaagatcatcgatgatctgagtacaccgcaggccttcattaccaccgacatggatcataaccagattacggcgtttcacggcggcgcaatgatgcgttcgtacgaaaatcacgttcgtgatgtgccgggtgttaccttgggcctcgtaggtcctgatggacgcgagggcatgatccaaaatgccgaagaatttgctgctatgggcattccgttcatttttgacccaggtcaggcagtgccgctgttcaacggccccgaactgcgcgagtttatcgaacaggcggactatgtggtggtcaacgattacgaaagcaatcttcttcaagcccgtactggctggaacgagcaggacattgtttcacgcgtgcaggcgtatatcaccacgcaaggttcggctggagccctggtacatacaccggagaagacctacgatattccggcggctaaaacccgtcgtgtcgttgatccaactggttgcggcgacgcgtttcgcgccggcctgatctatggtattcagcataattatgattggttgaccattggccgcatgggaaacttaatgggtgcgctgaaagtggaacaccctggcacccaaaatcagcgtttcgattttgccgaattcaacgaccagttcaaacaatattttggctacgcgctc

SEQ ID NO: 1372 - protein, 321 aa, synthetic construct
  REGION 1..321: note = variant of adenosine kinase from Xanthemonas campestris
MHHHHHHGGSGMSALICGSLAYDNIMVFPDQFKNHILPDRVHRLNVSFLVPDMRREFGGCAGNIAYNLHLLGGAPIVMATVGQDFGPYREHFETLGIDLSRVKIIDDLSTPQAFITTDMDHNQITAFHGGAMMRSYENHVRDVPGVTLGLVGPDGREGMIQNAEEFAAMGIPFIFDPGQAVPLFNGPELREFIEQADYVVVNDYESNLLQARTGWNEQDIVSRVQAYITTQGSAGALVHTPEKTYDIPAAKTRRVVDPTGCGDAFRAGLIYGIQHNYDWLTIGRMGNLMGALKVEHPGTQNQRFDFAEFNDQFKQYFGYAL

SEQ ID NO: 1373 - DNA, 963 bp, synthetic construct
  misc_feature 1..963: note = variant of adenosine kinase from Xanthemonas campestris
  source 1..963: mol_type = other DNA
atgcatcatcaccatcaccatggggggtccggtatgagtgcactcatttgcggttctttagcgtatgataacatcatggtgtttccggaccagttcaagaaccatattctgcccgatcgtgttcaccgcctcaatgtcagctttcttgtaccggacatgcgtcgtgaatttggaggctgtgccggcaacattgcgtacaatctgcatctgttgggtggtgctccgatcgtaatggctacggtgggccaagatttcggtccgtatcgcgagcacttcgaaactctgggcattgacttatcccgcgtcaagatcatcgatgatctgagtacaccgcaggccttcattaccaccgacatggatcataaccagattacggcgtttcactcgggcgcaatgatgcgttcgtacgaaaatcacgttcgtgatgtgccgggtgttaccttgggcctcgtaggtcctgatggacgcgagggcatgatccaaaatgccgaagaatttgctgctatgggcattccgttcatttttgacccaggtcaggcagtgccgctgttcaacggccccgaactgcgcgagtttatcgaacaggcggactatgtggtggtcaacgattacgaaagcaatcttcttcaagcccgtactggctggaacgagcaggacattgtttcacgcgtgcaggcgtatatcaccacgcaaggttcggctggagccctggtacatacaccggagaagacctacgatattccgccggctaaaacccgtcgtgtcgttgatccaactggttgcggcgacgcgtttcgcgccggcctgatctatggtattcagcataattatgattggttgaccattggccgcatgggaaacttaatgggtgcgctgaaagtggaacaccctggcacccaaaatcagcgtttcgattttgccgaattcaacgaccagttcaaacaatattttggctacgcgctc

SEQ ID NO: 1374 - protein, 321 aa, synthetic construct
  REGION 1..321: note = variant of adenosine kinase from Xanthemonas campestris
MHHHHHHGGSGMSALICGSLAYDNIMVFPDQFKNHILPDRVHRLNVSFLVPDMRREFGGCAGNIAYNLHLLGGAPIVMATVGQDFGPYREHFETLGIDLSRVKIIDDLSTPQAFITTDMDHNQITAFHSGAMMRSYENHVRDVPGVTLGLVGPDGREGMIQNAEEFAAMGIPFIFDPGQAVPLFNGPELREFIEQADYVVVNDYESNLLQARTGWNEQDIVSRVQAYITTQGSAGALVHTPEKTYDIPPAKTRRVVDPTGCGDAFRAGLIYGIQHNYDWLTIGRMGNLMGALKVEHPGTQNQRFDFAEFNDQFKQYFGYAL

SEQ ID NO: 1375 - DNA, 963 bp, synthetic construct
  misc_feature 1..963: note = variant of adenosine kinase from Xanthemonas campestris
  source 1..963: mol_type = other DNA
atgcatcatcaccatcaccatggggggtccggtatgagtgcactcatttgcggttctttagcgtatgataacatcatggtgtttccggaccagttcaagaaccatattctgcccgatcgtgttcaccgcctcaatgtcagctttcttgtaccggacatgcgtcgtgaatttggaggctgtgccggcaacattgcgtacaatctgcatctgttgggtggtgctccgatcgtaatggctacggtgggccaagatttcggtccgtatcgcgagcacttcgaaactctgggcattgacttatcccgcgtcaagatcatcgatgatctgagtacaccgcaggccttcattaccaccgacatggatcataaccagattacggcgtttcacggcggcgcaatgatgcgttcgtacgaaaatcacgttcgtgatgtgccgggtgttaccttgggcctcgtagctcctgatggacgcgagggcatgatccaaaatgccgaagaatttgctgctatgggcattccgttcatttttgacccaggtcaggcagtgccgctgttcaacggccccgaactgcgcgagtttatcgaacaggcggactatgtggtggtcaacgattacgaaagcaatcttcttcaagcccgtactggctggaacgagcaggacattgtttcacgcgtgcaggcgtatatcaccacgcaaggttcggctggagccctggtacatacaccggagaagacctacgatattccgccggctaaaacccgtcgtgtcgttgatccaactggttgcggcgacgcgtttcgcgccggcctgatctatggtattcagcataattatgattggttgaccattggccgcatgggaaacttaatgggtgcgctgaaagtggaacaccctggcacccaaaatcagcgtttcgattttgccgaattcaacgaccagttcaaacaatattttggctacgcgctc

SEQ ID NO: 1376 - protein, 321 aa, synthetic construct
  REGION 1..321: note = variant of adenosine kinase from Xanthemonas campestris
MHHHHHHGGSGMSALICGSLAYDNIMVFPDQFKNHILPDRVHRLNVSFLVPDMRREFGGCAGNIAYNLHLLGGAPIVMATVGQDFGPYREHFETLGIDLSRVKIIDDLSTPQAFITTDMDHNQITAFHGGAMMRSYENHVRDVPGVTLGLVAPDGREGMIQNAEEFAAMGIPFIFDPGQAVPLFNGPELREFIEQADYVVVNDYESNLLQARTGWNEQDIVSRVQAYITTQGSAGALVHTPEKTYDIPPAKTRRVVDPTGCGDAFRAGLIYGIQHNYDWLTIGRMGNLMGALKVEHPGTQNQRFDFAEFNDQFKQYFGYAL

SEQ ID NO: 1377 - DNA, 963 bp, synthetic construct
  misc_feature 1..963: note = variant of adenosine kinase from Xanthemonas campestris
  source 1..963: mol_type = other DNA
atgcatcatcaccatcaccatggggggtccggtatgagtgcactcatttgcggttctttagcgtatgataacatcatggtgtttccggaccagttcaagaaccatattctgcccgatcgtgttcaccgcctcaatgtcagctttcttgtaccggacatgcgtcgtgaatttggaggctgtgccggcaacattgcgtacaatctgcatctgttgggtggtgctccgatcgtaatggctacggtgggccaagatttcggtccgtatcgcgagcacttcgaaactctgggcattgacttatcccgcgtcaagatcatcgatgatctgagtacaccgcaggccttcattaccaccgacatggatcataaccagattacggcgtttcacggcggcgcaatgatgcgttcgtacgaaaatcacgttcgtgatgtgccgggtgttaccttgggcctcgtaggtcctgatggacgcgagggcatgatccaaaatgccgaagaatttgctgctatgggcattccgttcatttttgacccaggtcaggcagtgccgctgttcaacggccccgaactgcgcgagtttatcgaacaggcggactatgtggtggtcaacgattacgaaagcaatcttcttcaagcccgtactggctggaacgagcaggacattgtttcacgcgtgcaggcgtatatcaccacgcaaggttcggctggagccgttgtacatacaccggagaagacctacgatattccgccggctaaaacccgtcgtgtcgttgatccaactggttgcggcgacgcgtttcgcgccggcctgatctatggtattcagcataattatgattggttgaccattggccgcatgggaaacttaatgggtgcgctgaaagtggaacaccctggcacccaaaatcagcgtttcgattttgccgaattcaacgaccagttcaaacaatattttggctacgcgctc

SEQ ID NO: 1378 - protein, 321 aa, synthetic construct
  REGION 1..321: note = variant of adenosine kinase from Xanthemonas campestris
MHHHHHHGGSGMSALICGSLAYDNIMVFPDQFKNHILPDRVHRLNVSFLVPDMRREFGGCAGNIAYNLHLLGGAPIVMATVGQDFGPYREHFETLGIDLSRVKIIDDLSTPQAFITTDMDHNQITAFHGGAMMRSYENHVRDVPGVTLGLVGPDGREGMIQNAEEFAAMGIPFIFDPGQAVPLFNGPELREFIEQADYVVVNDYESNLLQARTGWNEQDIVSRVQAYITTQGSAGAVVHTPEKTYDIPPAKTRRVVDPTGCGDAFRAGLIYGIQHNYDWLTIGRMGNLMGALKVEHPGTQNQRFDFAEFNDQFKQYFGYAL

SEQ ID NO: 1379 - DNA, 963 bp, synthetic construct
  misc_feature 1..963: note = variant of adenosine kinase from Xanthemonas campestris
  source 1..963: mol_type = other DNA
atgcatcatcaccatcaccatggggggtccggtatgagtgcactcatttgcggttctttagcgtatgataacatcatggtgtttccggaccagttcaagaaccatattctgcccgatcgtgttcaccgcctcaatgtcagctttcttgtaccggacatgcgtcgtgaatttggaggctgtgccggcaacattgcgtacaatctgcatctgttgggtggtgctccgatcgtaatggctacggtgggccaagatttcggtccgtatcgcgagcacttcgaaactctgggcattgacttatcccgcgtcaagatcatcgatgatctgagtacaccgcaggccttcattaccaccgacatggatcataaccagattacggcgtttcacggcggcgcaatgatgcgttcgtacgaaaatcacgttcgtgatgtgccgggtgttaccttgggcctcgtaggtcctgatgcgcgcgagggcatgatccaaaatgccgaagaatttgctgctatgggcattccgttcatttttgacccaggtcaggcagtgccgctgttcaacggccccgaactgcgcgagtttatcgaacaggcggactatgtggtggtcaacgattacgaaagcaatcttcttcaagcccgtactggctggaacgagcaggacattgtttcacgcgtgcaggcgtatatcaccacgcaaggttcggctggagccctggtacatacaccggagaagacctacgatattccgccggctaaaacccgtcgtgtcgttgatccaactggttgcggcgacgcgtttcgcgccggcctgatctatggtattcagcataattatgattggttgaccattggccgcatgggaaacttaatgggtgcgctgaaagtggaacaccctggcacccaaaatcagcgtttcgattttgccgaattcaacgaccagttcaaacaatattttggctacgcgctc

SEQ ID NO: 1380 - protein, 321 aa, synthetic construct
  REGION 1..321: note = variant of adenosine kinase from Xanthemonas campestris
MHHHHHHGGSGMSALICGSLAYDNIMVFPDQFKNHILPDRVHRLNVSFLVPDMRREFGGCAGNIAYNLHLLGGAPIVMATVGQDFGPYREHFETLGIDLSRVKIIDDLSTPQAFITTDMDHNQITAFHGGAMMRSYENHVRDVPGVTLGLVGPDAREGMIQNAEEFAAMGIPFIFDPGQAVPLFNGPELREFIEQADYVVVNDYESNLLQARTGWNEQDIVSRVQAYITTQGSAGALVHTPEKTYDIPPAKTRRVVDPTGCGDAFRAGLIYGIQHNYDWLTIGRMGNLMGALKVEHPGTQNQRFDFAEFNDQFKQYFGYAL

SEQ ID NO: 1381 - DNA, 963 bp, synthetic construct
  misc_feature 1..963: note = variant of adenosine kinase from Xanthemonas campestris
  source 1..963: mol_type = other DNA
atgcatcatcaccatcaccatggggggtccggtatgagtgcactcatttgcggttctttagcgtatgataacatcatggtgtttccggaccagttcaagaaccatattctgcccgatcgtgttcaccgcctcaatgtcagctttcttgtaccggacatgcgtcgtgaatttggaggctgtgccggcaacattgcgtacaatctgcatctgttgggtggtgctccgatcgtaatggctacggtgggccaagatttcggtccgtatcgcgagcacttcgaaactctgggcattgacttatcccgcgtcaagatcatcgatgatctgagtacaccgcaggccttcattaccaccgacatggatcaaaaccagattacggcgtttcacagcggcgcaatgatgcgttcgtacgaaaatcacgttcgtgatgtgccgggtgttaccttgggcctcgtaggtcctgatggacgcgagggcatgatccaaaatgccgaagaatttgctgctatgggcattccgttcatttttgacccaggtcaggcagtgcctctgttcaacggccccgaactgcgcgagtttatcgaacaggcggactatgtggtggtcaacgattacgaaagccgtcttcttcaagcccgtactggctggaacgagcaggacattgtttcacgcgtgcaggcgtatatcaccacgcaaggttcggctggagccgtggtacatacaccggagaagacctacgatattccggctgctaaaactcgtcgtgtcgttgatccaactggttgcggcgacgcgtttcgcgccggcctgatctatggtattcagcataattatgattggttgaccattggccgcatgggaaacttaatgggtgcgctgaaagtggaacaccctggcacccaaaatcagcgtttcgattttgccgaattcaacgaccagttcaaacaatattttggctacgcgctc

SEQ ID NO: 1382 - protein, 321 aa, synthetic construct
  REGION 1..321: note = variant of adenosine kinase from Xanthemonas campestris
MHHHHHHGGSGMSALICGSLAYDNIMVFPDQFKNHILPDRVHRLNVSFLVPDMRREFGGCAGNIAYNLHLLGGAPIVMATVGQDFGPYREHFETLGIDLSRVKIIDDLSTPQAFITTDMDQNQITAFHSGAMMRSYENHVRDVPGVTLGLVGPDGREGMIQNAEEFAAMGIPFIFDPGQAVPLFNGPELREFIEQADYVVVNDYESRLLQARTGWNEQDIVSRVQAYITTQGSAGAVVHTPEKTYDIPAAKTRRVVDPTGCGDAFRAGLIYGIQHNYDWLTIGRMGNLMGALKVEHPGTQNQRFDFAEFNDQFKQYFGYAL

SEQ ID NO: 1383 - DNA, 963 bp, synthetic construct
  misc_feature 1..963: note = variant of adenosine kinase from Xanthemonas campestris
  source 1..963: mol_type = other DNA
atgcatcatcaccatcaccatggggggtccggtatgagtgcactcatttgcggttctttagcgtatgataacatcatggtgtttccggaccagttcaagaaccatattctgcccgatcgtgttcaccgcctcaatgtcagctttcttgtaccggacatgcgtcgtgaatttggaggctgtgccggcaacattgcgtacaatctgcatctgttgggtggtgctccgatcgtaatggctacggtgggccaagatttcggtccgtatcgcgagcacttcgaaactctgggcattgacttatcccgcgtcaagatcatcgatgatctgagtacaccgcaggccttcattaccaccgacatggatcaaaaccagattacggcgtttcacagcggcgcaatgatgcgttcgtacgaaaatcacgttcgtgatgtgccgggtgttaccttgggcctcgtaggtcctgatggacgcgagggcatgatccaaaatgccgaagaatttgctgctatgggcattccgttcatttttgacccaggtcaggcagtgcctctgttcaacggccccgaactgcgcgagtttatcgaacaggcggactatgtggtggtcaacgattacgaaagccgtcttcttcaagcccgtactggctggaacgagcaggacattgtttcacgcgtgcaggcgtatatcaccacgcaaggttcggctggagccctggtacatacaccggagaagacctacgatattccggctgctaaaactcgtcgtgtcgttgatccaactggttgcggcgacgcgtttcgcgccggcctgatctatggtattcagcataattatgattggttgaccattggccgcatgggaaacttaatgggtgcgctgaaagtggaacaccctggcacccaaaatcagcgtttcgattttgccgaattcaacgaccagttcaaacaatattttggctacgcgctc

SEQ ID NO: 1384 - protein, 321 aa, synthetic construct
  REGION 1..321: note = variant of adenosine kinase from Xanthemonas campestris
MHHHHHHGGSGMSALICGSLAYDNIMVFPDQFKNHILPDRVHRLNVSFLVPDMRREFGGCAGNIAYNLHLLGGAPIVMATVGQDFGPYREHFETLGIDLSRVKIIDDLSTPQAFITTDMDQNQITAFHSGAMMRSYENHVRDVPGVTLGLVGPDGREGMIQNAEEFAAMGIPFIFDPGQAVPLFNGPELREFIEQADYVVVNDYESRLLQARTGWNEQDIVSRVQAYITTQGSAGALVHTPEKTYDIPAAKTRRVVDPTGCGDAFRAGLIYGIQHNYDWLTIGRMGNLMGALKVEHPGTQNQRFDFAEFNDQFKQYFGYAL

SEQ ID NO: 1385 - DNA, 963 bp, synthetic construct
  misc_feature 1..963: note = variant of adenosine kinase from Xanthemonas campestris
  source 1..963: mol_type = other DNA
atgcatcatcaccatcaccatggggggtccggtatgagtgcactcatttgcggttctttagcgtatgataacatcatgccgtttccggaccagttcaagaaccatattctgcccgatcgtgttcaccgcctcaatgtcagctttcttgtaccggacatgcgtcgtgaatttggaggctgtgccggcaacattgcgtacaatctgcatctgttgggtggtgctccgatcgtaatggctacggtgggccaagatttcggtccgtatcgcgagcacttcgaaactctgggcattgacttatcccgcgtcaagatcatcgatgatctgagtacaccgcaggccttcattaccaccgacatggatcaaaaccagattacggcgtttcacggcggcgcaatgatgcgttcgtacgaaaatcacgttcgtgatgtgccgggtgttaccttgggcctcgtaggtcctgatggacgcgagggcatgatccaaaatgccgaagaatttgctgctatgggcattccgttcatttttgacccaggtcaggcagtgcctctgttcaacggccccgaactgcgcgagtttatcgaacaggcggactatgtggtggtcaacgattacgaaagccgtcttcttcaagcccgtactggctggaacgagcaggacattgtttcacgcgtgcaggcgtatatcaccacgcaaggttcggctggagccctggtacatacaccggagaagacctacgatattccgccggctaaaacccgtcgtgtcgttgatccaactggttgcggcgacgcgtttcgcgccggcctgatctatggtattcagcataattatgattggttgaccattggccgcatgggaaacttaatgggtgcgctgaaagtggaacaccctggcacccaaaatcagcgtttcgattttgccgaattcaacgaccagttcaaacaatattttggctacgcgctc

SEQ ID NO: 1386 - protein, 321 aa, synthetic construct
  REGION 1..321: note = variant of adenosine kinase from Xanthemonas campestris
MHHHHHHGGSGMSALICGSLAYDNIMPFPDQFKNHILPDRVHRLNVSFLVPDMRREFGGCAGNIAYNLHLLGGAPIVMATVGQDFGPYREHFETLGIDLSRVKIIDDLSTPQAFITTDMDQNQITAFHGGAMMRSYENHVRDVPGVTLGLVGPDGREGMIQNAEEFAAMGIPFIFDPGQAVPLFNGPELREFIEQADYVVVNDYESRLLQARTGWNEQDIVSRVQAYITTQGSAGALVHTPEKTYDIPPAKTRRVVDPTGCGDAFRAGLIYGIQHNYDWLTIGRMGNLMGALKVEHPGTQNQRFDFAEFNDQFKQYFGYAL

SEQ ID NO: 1387 - DNA, 963 bp, synthetic construct
  misc_feature 1..963: note = variant of adenosine kinase from Xanthemonas campestris
  source 1..963: mol_type = other DNA
atgcatcatcaccatcaccatggggggtccggtatgagtgcactcatttgcggttctttagcgtatgataacatcatgccatttccggaccagttcaagaaccatattctgcccgatcgtgttcaccgcctcaatgtcagctttcttgtaccggacatgcgtcgtgaatttggaggctgtgccggcaacattgcgtacaatctgcatctgttgggtggtgctccgatcgtaatggctacggtgggccaagatttcggtccgtatcgcgagcacttcgaaactctgggcattgacttatcccgcgtcaagatcatcgatgatctgagtacaccgcaggccttcattaccaccgacatggatcaaaaccagattacggcgtttcacggcggcgcaatgatgcgttcgtacgaaaatcacgttcgtgatgtgccgggtgttaccttgggcctcgtaggtcctgatggacgcgagggcatgatccaaaatgccgaagaatttgctgctatgggcattccgttcatttttgacccaggtcaggcagtgcctctgttcaacggccccgaactgcgcgagtttatcgaacaggcggactatgtggtggtcaacgattacgaaagccgtcttcttcaagcccgtactggctggaacgagcaggacattgtttcacgcgtgcaggcgtatatcaccacgcaaggttcggctggagccctggtacatacaccggagaagacctacgatattccggctgctaaaactcgtcgtgtcgttgatccaactggttgcggcgacgcgtttcgcgccggcctgatctatggtattcagcataattatgattggttgaccattggccgcatgggaaacttaatgggtgcgctgaaagtggaacaccctggcacccaaaatcagcgtttcgattttgccgaattcaacgaccagttcaaacaatattttggctacgcgctc

SEQ ID NO: 1388 - protein, 321 aa, synthetic construct
  REGION 1..321: note = variant of adenosine kinase from Xanthemonas campestris
MHHHHHHGGSGMSALICGSLAYDNIMPFPDQFKNHILPDRVHRLNVSFLVPDMRREFGGCAGNIAYNLHLLGGAPIVMATVGQDFGPYREHFETLGIDLSRVKIIDDLSTPQAFITTDMDQNQITAFHGGAMMRSYENHVRDVPGVTLGLVGPDGREGMIQNAEEFAAMGIPFIFDPGQAVPLFNGPELREFIEQADYVVVNDYESRLLQARTGWNEQDIVSRVQAYITTQGSAGALVHTPEKTYDIPAAKTRRVVDPTGCGDAFRAGLIYGIQHNYDWLTIGRMGNLMGALKVEHPGTQNQRFDFAEFNDQFKQYFGYAL

SEQ ID NO: 1389 - DNA, 963 bp, synthetic construct
  misc_feature 1..963: note = variant of adenosine kinase from Xanthemonas campestris
  source 1..963: mol_type = other DNA
atgcatcatcaccatcaccatggggggtccggtatgagtgcactcatttgcggttctttagcgtatgataacatcatggtgtttccggaccagttcaagaaccatattctgcccgatcgtgttcaccgcctcaatgtcagctttcttgtaccggacatgcgtcgtgaatttggaggctgtgccggcaacattgcgtacaatctgcatctgttgggtggtgctccgatcgtaatggctacggtgggccaagatttcggtccgtatcgcgagcacttcgaaactctgggcattgacttatcccgcgtcaagatcatcgatgatctgagtacaccgcaggccttcattaccaccgacatggatcaaaaccagattacggcgtttcacggcggcgcaatgatgcgttcgtacgaaaatcacgttcgtgatgtgccgggtgttaccttgggcctcgtaggtcctgatggacgcgagggcatgatccaaaatgccgaagaatttgctgctatgggcattccgttcatttttgacccaggtcaggcagtgcctctgttcaacggccccgaactgcgcgagtttatcgaacaggcggactatgtggtggtcaacgattacgaaagccgtcttcttcaagcccgtactggctggaacgagcaggacattgtttcacgcgtgcaggcgtatatcaccacgcaaggttcggctggagccctggtacatacaccggagaagacctacgatattccgcctgctaaaactcgtcgtgtcgttgatccaactggttgcggcgacgcgtttcgcgccggcctgatctatggtattcagcataattatgattggttgaccattggccgcatgggaaacttaatgggtgcgctgaaagtggaacaccctggcacccaaaatcagcgtttcgattttgccgaattcaacgaccagttcaaacaatattttggctacgcgctc

SEQ ID NO: 1390 - protein, 321 aa, synthetic construct
  REGION 1..321: note = variant of adenosine kinase from Xanthemonas campestris
MHHHHHHGGSGMSALICGSLAYDNIMVFPDQFKNHILPDRVHRLNVSFLVPDMRREFGGCAGNIAYNLHLLGGAPIVMATVGQDFGPYREHFETLGIDLSRVKIIDDLSTPQAFITTDMDQNQITAFHGGAMMRSYENHVRDVPGVTLGLVGPDGREGMIQNAEEFAAMGIPFIFDPGQAVPLFNGPELREFIEQADYVVVNDYESRLLQARTGWNEQDIVSRVQAYITTQGSAGALVHTPEKTYDIPPAKTRRVVDPTGCGDAFRAGLIYGIQHNYDWLTIGRMGNLMGALKVEHPGTQNQRFDFAEFNDQFKQYFGYAL

SEQ ID NO: 1391 - DNA, 963 bp, synthetic construct
  misc_feature 1..963: note = variant of adenosine kinase from Xanthemonas campestris
  source 1..963: mol_type = other DNA
atgcatcatcaccatcaccatggggggtccggtatgagtgcactcatttgcggttctttagcgtatgataacatcatggtgtttccggaccagttcaagaaccatattctgcccgatcgtgttcaccgcctcaatgtcagctttcttgtaccggacatgcgtcgtgaatttggaggctgtgccggcaacattgcgtacaatctgcatctgttgggtggtgctccgatcgtaatggctacggtgggccaagatttcggtccgtatcgcgagcacttcgaaactctgggcattgacttatcccgcgtcaagatcatcgatgatctgagtacaccgcaggccttcattaccaccgacatggatcaaaaccagattacggcgtttcacggcggcgcaatgatgcgttcgtacgaaaatcacgttcgtgatgtgccgggtgttaccttgggcctcgtaggtcctgatggacgcgagggcatgatccaaaatgccgaagaatttgctgctatgggcattccgttcatttttgacccaggtcaggcagtgccgctgttcaacggccccgaactgcgcgagtttatcgaacaggcggactatgtggtggtcaacgattacgaaagcaatcttcttcaagcccgtactggctggaacgagcaggacattgtttcacgcgtgcaggcgtatatcaccacgcaaggttcggctggagccgtggtacatacaccggagaagacctacgatattccgcctgctaaaactcgtcgtgtcgttgatccaactggttgcggcgacgcgtttcgcgccggcctgatctatggtattcagcataattatgattggttgaccattggccgcatgggaaacttaatgggtgcgctgaaagtggaacaccctggcacccaaaatcagcgtttcgattttgccgaattcaacgaccagttcaaacaatattttggctacgcgctc

SEQ ID NO: 1392 - protein, 321 aa, synthetic construct
  REGION 1..321: note = variant of adenosine kinase from Xanthemonas campestris
MHHHHHHGGSGMSALICGSLAYDNIMVFPDQFKNHILPDRVHRLNVSFLVPDMRREFGGCAGNIAYNLHLLGGAPIVMATVGQDFGPYREHFETLGIDLSRVKIIDDLSTPQAFITTDMDQNQITAFHGGAMMRSYENHVRDVPGVTLGLVGPDGREGMIQNAEEFAAMGIPFIFDPGQAVPLFNGPELREFIEQADYVVVNDYESNLLQARTGWNEQDIVSRVQAYITTQGSAGAVVHTPEKTYDIPPAKTRRVVDPTGCGDAFRAGLIYGIQHNYDWLTIGRMGNLMGALKVEHPGTQNQRFDFAEFNDQFKQYFGYAL

SEQ ID NO: 1393 - DNA, 963 bp, synthetic construct
  misc_feature 1..963: note = variant of adenosine kinase from Xanthemonas campestris
  source 1..963: mol_type = other DNA
atgcatcatcaccatcaccatggggggtccggtatgagtgcactcatttgcggttctttagcgtatgataacatcatggtgtttccggaccagttcaagaaccatattctgcccgatcgtgttcaccgcctcaatgtcagctttcttgtaccggacatgcgtcgtgaatttggaggctgtgccggcaacattgcgtacaatctgcatctgttgggtggtgctccgatcgtaatggctacggtgggccaagatttcggtccgtatcgcgagcacttcgaaactctgggcattgacttatcccgcgtcaagatcatcgatgatctgagtacaccgcaggccttcattaccaccgacatggatcaaaaccagattacggcgtttcacggcggcgcaatgatgcgttcgtacgaaaatcacgttcgtgatgtgccgggtgttaccttgggcctcgtaggtcctgatggacgcgagggcatgatccaaaatgccgaagaatttgctgctatgggcattccgttcatttttgacccaggtcaggcagtgccgctgttcaacggccccgaactgcgcgagtttatcgaacaggcggactatgtggtggtcaacgattacgaaagcaatcttcttcaagcccgtactggctggaacgagcaggacattgtttcacgcgtgcaggcgtatatcaccacgcaaggttcggctggagccctggtacatacaccggagaagacctacgatattccggctgctaaaactcgtcgtgtcgttgatccaactggttgcggcgacgcgtttcgcgccggcctgatctatggtattcagcataattatgattggttgaccattggccgcatgggaaacttaatgggtgcgctgaaagtggaacaccctggcacccaaaatcagcgtttcgattttgccgaattcaacgaccagttcaaacaatattttggctacgcgctc

SEQ ID NO: 1394 - protein, 321 aa, synthetic construct
  REGION 1..321: note = variant of adenosine kinase from Xanthemonas campestris
MHHHHHHGGSGMSALICGSLAYDNIMVFPDQFKNHILPDRVHRLNVSFLVPDMRREFGGCAGNIAYNLHLLGGAPIVMATVGQDFGPYREHFETLGIDLSRVKIIDDLSTPQAFITTDMDQNQITAFHGGAMMRSYENHVRDVPGVTLGLVGPDGREGMIQNAEEFAAMGIPFIFDPGQAVPLFNGPELREFIEQADYVVVNDYESNLLQARTGWNEQDIVSRVQAYITTQGSAGALVHTPEKTYDIPAAKTRRVVDPTGCGDAFRAGLIYGIQHNYDWLTIGRMGNLMGALKVEHPGTQNQRFDFAEFNDQFKQYFGYAL

SEQ ID NO: 1395 - DNA, 963 bp, synthetic construct
  misc_feature 1..963: note = variant of adenosine kinase from Xanthemonas campestris
  source 1..963: mol_type = other DNA
atgcatcatcaccatcaccatggggggtccggtatgagtgcactcatttgcggttctttagcgtatgataacatcatggtgtttccggaccagttcaagaaccatattctgcccgatcgtgttcaccgcctcaatgtcagctttcttgtaccggacatgcgtcgtgaatttggaggctgtgccggcaacattgcgtacaatctgcatctgttgggtggtgctccgatcgtaatggctacggtgggccaagatttcggtccgtatcgcgagcacttcgaaactctgggcattgacttatcccgcgtcaagatcatcgatgatctgagtacaccgcaggccttcattaccaccgacatggatcaaaaccagattacggcgtttcacggcggcgcaatgatgcgttcgtacgaaaatcacgttcgtgatgtgccgggtgttaccttgggcctcgtaggtcctgatggacgcgagggcatgatccaaaatgccgaagaatttgctgctatgggcattccgttcatttttgacccaggtcaggcagtgcctctgttcaacggccccgaactgcgcgagtttatcgaacaggcggactatgtggtggtcaacgattacgaaagccgtcttcttcaagcccgtactggctggaacgagcaggacattgtttcacgcgtgcaggcgtatatcaccacgcaaggttcggctggagccctggtacatacaccggagaagacctacgatattccgcctgctaaagtccgtcgtgtcgttgatccaactggttgcggcgacgcgtttcgcgccggcctgatctatggtattcagcataattatgattggttgaccattggccgcatgggaaacttaatgggtgcgctgaaagtggaacaccctggcacccaaaatcagcgtttcgattttgccgaattcaacgaccagttcaaacaatattttggctacgcgctc

SEQ ID NO: 1396 - protein, 321 aa, synthetic construct
  REGION 1..321: note = variant of adenosine kinase from Xanthemonas campestris
MHHHHHHGGSGMSALICGSLAYDNIMVFPDQFKNHILPDRVHRLNVSFLVPDMRREFGGCAGNIAYNLHLLGGAPIVMATVGQDFGPYREHFETLGIDLSRVKIIDDLSTPQAFITTDMDQNQITAFHGGAMMRSYENHVRDVPGVTLGLVGPDGREGMIQNAEEFAAMGIPFIFDPGQAVPLFNGPELREFIEQADYVVVNDYESRLLQARTGWNEQDIVSRVQAYITTQGSAGALVHTPEKTYDIPPAKVRRVVDPTGCGDAFRAGLIYGIQHNYDWLTIGRMGNLMGALKVEHPGTQNQRFDFAEFNDQFKQYFGYAL

SEQ ID NO: 1397 - DNA, 963 bp, synthetic construct
  misc_feature 1..963: note = variant of adenosine kinase from Xanthemonas campestris
  source 1..963: mol_type = other DNA
atgcatcatcaccatcaccatggggggtccggtatgagtgcactcatttgcggttctttagcgtatgataacatcatgccatttccggaccagttcaagaaccatattctgcccgatcgtgttcaccgcctcaatgtcagctttcttgtaccggacatgcgtcgtgaatttggaggctgtgccggcaacattgcgtacaatctgcatctgttgggtggtgctccgatcgtaatggctacggtgggccaagatttcggtccgtatcgcgagcacttcgaaactctgggcattgacttatcccgcgtcaagatcatcgatgatctgagtacaccgcaggccttcattaccaccgacatggatcaaaaccagattacggcgtttcacagcggcgcaatgatgcgttcgtacgaaaatcacgttcgtgatgtgccgggtgttaccttgggcctcgtaggtcctgatggacgcgagggcatgatccaaaatgccgaagaatttgctgctatgggcattccgttcatttttgacccaggtcaggcagtgcctctgttcaacggccccgaactgcgcgagtttatcgaacaggcggactatgtggtggtcaacgattacgaaagccgtcttcttcaagcccgtactggctggaacgagcaggacattgtttcacgcgtgcaggcgtatatcaccacgcaaggttcggctggagccctggtacatacaccggagaagacctacgatattccgccggctaaaacccgtcgtgtcgttgatccaactggttgcggcgacgcgtttcgcgccggcctgatctatggtattcagcataattatgattggttgaccattggccgcatgggaaacttaatgggtgcgctgaaagtggaacaccctggcacccaaaatcagcgtttcgattttgccgaattcaacgaccagttcaaacaatattttggctacgcgctc

SEQ ID NO: 1398 - protein, 321 aa, synthetic construct
  REGION 1..321: note = variant of adenosine kinase from Xanthemonas campestris
MHHHHHHGGSGMSALICGSLAYDNIMPFPDQFKNHILPDRVHRLNVSFLVPDMRREFGGCAGNIAYNLHLLGGAPIVMATVGQDFGPYREHFETLGIDLSRVKIIDDLSTPQAFITTDMDQNQITAFHSGAMMRSYENHVRDVPGVTLGLVGPDGREGMIQNAEEFAAMGIPFIFDPGQAVPLFNGPELREFIEQADYVVVNDYESRLLQARTGWNEQDIVSRVQAYITTQGSAGALVHTPEKTYDIPPAKTRRVVDPTGCGDAFRAGLIYGIQHNYDWLTIGRMGNLMGALKVEHPGTQNQRFDFAEFNDQFKQYFGYAL

SEQ ID NO: 1399 - DNA, 963 bp, synthetic construct
  misc_feature 1..963: note = variant of adenosine kinase from Xanthemonas campestris
  source 1..963: mol_type = other DNA
atgcatcatcaccatcaccatggggggtccggtatgagtgcactcatttgcggttctttagcgtatgataacatcatgccatttccggaccagttcaagaaccatattctgcccgatcgtgttcaccgcctcaatgtcagctttcttgtaccggacatgcgtcgtgaatttggaggctgtgccggcaacattgcgtacaatctgcatctgttgggtggtgctccgatcgtaatggctacggtgggccaagatttcggtccgtatcgcgagcacttcgaaactctgggcattgacttatcccgcgtcaagatcatcgatgatctgagtacaccgcaggccttcattaccaccgacatggatcaaaaccagattacggcgtttcacagcggcgcaatgatgcgttcgtacgaaaatcacgttcgtgatgtgccgggtgttaccttgggcctcgtaggtcctgatggacgcgagggcatgatccaaaatgccgaagaatttgctgctatgggcattccgttcatttttgacccaggtcaggcagtgcctctgttcaacggccccgaactgcgcgagtttatcgaacaggcggactatgtggtggtcaacgattacgaaagcaatcttcttcaagcccgtactggctggaacgagcaggacattgtttcacgcgtgcaggcgtatatcaccacgcaaggttcggctggagccgtggtacatacaccggagaagacctacgatattccgccggctaaaacccgtcgtgtcgttgatccaactggttgcggcgacgcgtttcgcgccggcctgatctatggtattcagcataattatgattggttgaccattggccgcatgggaaacttaatgggtgcgctgaaagtggaacaccctggcacccaaaatcagcgtttcgattttgccgaattcaacgaccagttcaaacaatattttggctacgcgctc

SEQ ID NO: 1400 - protein, 321 aa, synthetic construct
  REGION 1..321: note = variant of adenosine kinase from Xanthemonas campestris
MHHHHHHGGSGMSALICGSLAYDNIMPFPDQFKNHILPDRVHRLNVSFLVPDMRREFGGCAGNIAYNLHLLGGAPIVMATVGQDFGPYREHFETLGIDLSRVKIIDDLSTPQAFITTDMDQNQITAFHSGAMMRSYENHVRDVPGVTLGLVGPDGREGMIQNAEEFAAMGIPFIFDPGQAVPLFNGPELREFIEQADYVVVNDYESNLLQARTGWNEQDIVSRVQAYITTQGSAGAVVHTPEKTYDIPPAKTRRVVDPTGCGDAFRAGLIYGIQHNYDWLTIGRMGNLMGALKVEHPGTQNQRFDFAEFNDQFKQYFGYAL

SEQ ID NO: 1401 - DNA, 963 bp, synthetic construct
  misc_feature 1..963: note = variant of adenosine kinase from Xanthemonas campestris
  source 1..963: mol_type = other DNA
atgcatcatcaccatcaccatggggggtccggtatgagtgcactcatttgcggttctttagcgtatgataacatcatggtgtttccggaccagttcaagaaccatattctgcccgatcgtgttcaccgcctcaatgtcagctttcttgtaccggacatgcgtcgtgaatttggaggctgtgccggcaacattgcgtacaatctgcatctgttgggtggtgctccgatcgtaatggctacggtgggccaagatttcggtccgtatcgcgagcacttcgaaactctgggcattgacttatcccgcgtcaagatcatcgatgatctgagtacaccgcaggccttcattaccaccgacatggatcataaccagattacggcgtttcacggcggcgcaatgatgcgttcgtacgaaaatcacgttcgtgatgtgccgggtgttaccttgggcctcgtaggtcctgatggacgcgagggcatgatccaaaatgccgaagaatttgctgctatgggcattccgttcatttttgacccaggtcaggcagtgcctctgttcaacggccccgaactgcgcgagtttatcgaacaggcggactatgtggtggtcaacgattacgaaagccgtcttcttcaagcccgtactggctggaacgagcaggacattgtttcacgcgtgcaggcgtatatcaccacgcaaggttcggctggagccctggtacatacaccggagaagacctacgatattccgcctgctaaaactcgtcgtgtcgttgatccaactggttgcggcgacgcgtttcgcgccggcctgatctatggtattcagcataattatgattggttgaccattggccgcatgggaaacttaatgggtgcgctgaaagtggaacaccctggcacccaaaatcagcgtttcgattttgccgaattcaacgaccagttcaaacaatattttggctacgcgctc

SEQ ID NO: 1402 - protein, 321 aa, synthetic construct
  REGION 1..321: note = variant of adenosine kinase from Xanthemonas campestris
MHHHHHHGGSGMSALICGSLAYDNIMVFPDQFKNHILPDRVHRLNVSFLVPDMRREFGGCAGNIAYNLHLLGGAPIVMATVGQDFGPYREHFETLGIDLSRVKIIDDLSTPQAFITTDMDHNQITAFHGGAMMRSYENHVRDVPGVTLGLVGPDGREGMIQNAEEFAAMGIPFIFDPGQAVPLFNGPELREFIEQADYVVVNDYESRLLQARTGWNEQDIVSRVQAYITTQGSAGALVHTPEKTYDIPPAKTRRVVDPTGCGDAFRAGLIYGIQHNYDWLTIGRMGNLMGALKVEHPGTQNQRFDFAEFNDQFKQYFGYAL

SEQ ID NO: 1403 - DNA, 963 bp, synthetic construct
  misc_feature 1..963: note = variant of adenosine kinase from Xanthemonas campestris
  source 1..963: mol_type = other DNA
atgcatcatcaccatcaccatggggggtccggtatgagtgcactcatttgcggttctttagcgtatgataacatcatggtgtttccggaccagttcaagaaccatattctgcccgatcgtgttcaccgcctcaatgtcagctttcttgtaccggacatgcgtcgtgaatttggaggctgtgccggcaacattgcgtacaatctgcatctgttgggtggtgctccgatcgtaatggctacggtgggccaagatttcggtccgtatcgcgagcacttcgaaactctgggcattgacttatcccgcgtcaagatcatcgatgatctgagtacaccgcaggccttcattaccaccgacatggatcacaaccagattacggcgtttcacggcggcgcaatgatgcgttcgtacgaaaatcacgttcgtgatgtgccgggtgttaccttgggcctcgtaggtcctgatggacgcgagggcatgatccaaaatgccgaagaatttgctgctatgggcattccgttcatttttgacccaggtcaggcagtggggctgttcaacggccccgaactgcgcgagtttatcgaacaggcggactatgtggtggtcaacgattacgaaagccgtcttcttcaagcccgtactggctggaacgagcaggacattgtttcacgcgtgcaggcgtatatcaccacgcaaggttcggctggagccctggtacatacaccggagaagacctacgatattccgccggctaaaacccgtcgtgtcgttgatccaactggttgcggcgacgcgtttcgcgccggcctgatctatggtattcagcataattatgattggttgaccattggccgcatgggaaacttaatgggtgcgctgaaagtggaacaccctggcacccaaaatcagcgtttcgattttgccgaattcaacgaccagttcaaacaatattttggctacgcgctc

SEQ ID NO: 1404 - protein, 321 aa, synthetic construct
  REGION 1..321: note = variant of adenosine kinase from Xanthemonas campestris
MHHHHHHGGSGMSALICGSLAYDNIMVFPDQFKNHILPDRVHRLNVSFLVPDMRREFGGCAGNIAYNLHLLGGAPIVMATVGQDFGPYREHFETLGIDLSRVKIIDDLSTPQAFITTDMDHNQITAFHGGAMMRSYENHVRDVPGVTLGLVGPDGREGMIQNAEEFAAMGIPFIFDPGQAVGLFNGPELREFIEQADYVVVNDYESRLLQARTGWNEQDIVSRVQAYITTQGSAGALVHTPEKTYDIPPAKTRRVVDPTGCGDAFRAGLIYGIQHNYDWLTIGRMGNLMGALKVEHPGTQNQRFDFAEFNDQFKQYFGYAL

SEQ ID NO: 1405 - DNA, 963 bp, synthetic construct
  misc_feature 1..963: note = variant of adenosine kinase from Xanthemonas campestris
  source 1..963: mol_type = other DNA
atgcatcatcaccatcaccatggggggtccggtatgagtgcactcatttgcggttctttagcgtatgataacatcatggtgtttccggaccagttcaagaaccatattctgcccgatcgtgttcaccgcctcaatgtcagctttcttgtaccggacatgcgtcgtgaatttggaggctgtgccggcaacattgcgtacaatctgcatctgttgggtggtgctccgatcgtaatggctacggtgggccaagatttcggtccgtatcgcgagcacttcgaaactctgggcattgacttatcccgcgtcaagatcatcgatgatctgagtacaccgcaggccttcattaccaccgacatggatcaaaaccagattacggcgtttcacagcggcgcaatgatgcgttcgtacgaaaatcacgttcgtgatgtgccgggtgttaccttgggcctcgtaggtcctgatggacgcgagggcatgatccaaaatgccgaagaatttgctgctatgggcattccgttcatttttgacccaggtcaggcagtgcctctgttcaacggccccgaactgcgcgagtttatcgaacaggcggactatgtggtggtcaacgattacgaaagcaatcttcttcaagcccgtactggctggaacgagcaggacattgtttcacgcgtgcaggcgtatatcaccacgcaaggttcggctggagccctggtacatacaccggagaagacctacgatattccgccggctaaaacccgtcgtgtcgttgatccaactggttgcggcgacgcgtttcgcgccggcctgatctatggtattcagcataattatgattggttgaccattggccgcatgggaaacttaatgggtgcgctgaaagtggaacaccctggcacccaaaatcagcgtttcgattttgccgaattcaacgaccagttcaaacaatattttggctacgcgctc

SEQ ID NO: 1406 - protein, 321 aa, synthetic construct
  REGION 1..321: note = variant of adenosine kinase from Xanthemonas campestris
MHHHHHHGGSGMSALICGSLAYDNIMVFPDQFKNHILPDRVHRLNVSFLVPDMRREFGGCAGNIAYNLHLLGGAPIVMATVGQDFGPYREHFETLGIDLSRVKIIDDLSTPQAFITTDMDQNQITAFHSGAMMRSYENHVRDVPGVTLGLVGPDGREGMIQNAEEFAAMGIPFIFDPGQAVPLFNGPELREFIEQADYVVVNDYESNLLQARTGWNEQDIVSRVQAYITTQGSAGALVHTPEKTYDIPPAKTRRVVDPTGCGDAFRAGLIYGIQHNYDWLTIGRMGNLMGALKVEHPGTQNQRFDFAEFNDQFKQYFGYAL

SEQ ID NO: 1407 - DNA, 963 bp, synthetic construct
  misc_feature 1..963: note = variant of adenosine kinase from Xanthemonas campestris
  source 1..963: mol_type = other DNA
atgcatcatcaccatcaccatggggggtccggtatgagtgcactcatttgcggttctttagcgtatgataacatcatggtgtttccggaccagttcaagaaccatattctgcccgatcgtgttcaccgcctcaatgtcagctttcttgtaccggacatgcgtcgtgaatttggaggctgtgccggcaacattgcgtacaatctgcatctgttgggtggtgctccgatcgtaatggctacggtgggccaagatttcggtccgtatcgcgagcacttcgaaactctgggcattgacttatcccgcgtcaagatcatcgatgatctgagtacaccgcaggccttcattaccaccgacatggatcaaaaccagattacggcgtttcacggcggcgcaatgatgcgttcgtacgaaaatcacgttcgtgatgtgccgggtgttaccttgggcctcgtaggtcctgatggacgcgagggcatgatccaaaatgccgaagaatttgctgctatgggcattccgttcatttttgacccaggtcaggcagtgcctctgttcaacggccccgaactgcgcgagtttatcgaacaggcggactatgtggtggtcaacgattacgaaagcaatcttcttcaagcccgtactggctggaacgagcaggacattgtttcacgcgtgcaggcgtatatcaccacgcaaggttcggctggagccgtggtacatacaccggagaagacctacgatattccgcctgctaaagtccgtcgtgtcgttgatccaactggttgcggcgacgcgtttcgcgccggcctgatctatggtattcagcataattatgattggttgaccattggccgcatgggaaacttaatgggtgcgctgaaagtggaacaccctggcacccaaaatcagcgtttcgattttgccgaattcaacgaccagttcaaacaatattttggctacgcgctc

SEQ ID NO: 1408 - protein, 321 aa, synthetic construct
  REGION 1..321: note = variant of adenosine kinase from Xanthemonas campestris
MHHHHHHGGSGMSALICGSLAYDNIMVFPDQFKNHILPDRVHRLNVSFLVPDMRREFGGCAGNIAYNLHLLGGAPIVMATVGQDFGPYREHFETLGIDLSRVKIIDDLSTPQAFITTDMDQNQITAFHGGAMMRSYENHVRDVPGVTLGLVGPDGREGMIQNAEEFAAMGIPFIFDPGQAVPLFNGPELREFIEQADYVVVNDYESNLLQARTGWNEQDIVSRVQAYITTQGSAGAVVHTPEKTYDIPPAKVRRVVDPTGCGDAFRAGLIYGIQHNYDWLTIGRMGNLMGALKVEHPGTQNQRFDFAEFNDQFKQYFGYAL

SEQ ID NO: 1409 - DNA, 963 bp, synthetic construct
  misc_feature 1..963: note = variant of adenosine kinase from Xanthemonas campestris
  source 1..963: mol_type = other DNA
atgcatcatcaccatcaccatggggggtccggtatgagtgcactcatttgcggttctttagcgtatgataacatcatggtgtttccggaccagttcaagaaccatattctgcccgatcgtgttcaccgcctcaatgtcagctttcttgtaccggacatgcgtcgtgaatttggaggctgtgccggcaacattgcgtacaatctgcatctgttgggtggtgctccgatcgtaatggctacggtgggccaagatttcggtccgtatcgcgagcacttcgaaactctgggcattgacttatcccgcgtcaagatcatcgatgatctgagtacaccgcaggccttcattaccaccgacatggatcataaccagattacggcgtttcacggcggcgcaatgatgcgttcgtacgaaaatcacgttcgtgatgtgccgggtgttaccttgggcctcgtaggtcctgatatccgcgagggcatgatccaaaatgccgaagaatttgctgctatgggcattccgttcatttttgacccaggtcaggcagtgccgctgttcaacggccccgaactgcgcgagtttatcgaacaggcggactatgtggtggtcaacgattacgaaagcaatcttcttcaagcccgtactggctggaacgagcaggacattgtttcacgcgtgcaggcgtatatcaccacgcaaggttcggctggagccctggtacatacaccggagaagacctacgatattccgccggctaagacccgtcgtgtcgttgatccaactggttgcggcgacgcgtttcgcgccggcctgatctatggtattcagcataattatgattggttgaccattggccgcatgggaaacttaatgggtgcgctgaaagtggaacaccctggcacccaaaatcagcgtttcgattttgccgaattcaacgaccagttcaaacaatattttggctacgcgctc

SEQ ID NO: 1410 - protein, 321 aa, synthetic construct
  REGION 1..321: note = variant of adenosine kinase from Xanthemonas campestris
MHHHHHHGGSGMSALICGSLAYDNIMVFPDQFKNHILPDRVHRLNVSFLVPDMRREFGGCAGNIAYNLHLLGGAPIVMATVGQDFGPYREHFETLGIDLSRVKIIDDLSTPQAFITTDMDHNQITAFHGGAMMRSYENHVRDVPGVTLGLVGPDIREGMIQNAEEFAAMGIPFIFDPGQAVPLFNGPELREFIEQADYVVVNDYESNLLQARTGWNEQDIVSRVQAYITTQGSAGALVHTPEKTYDIPPAKTRRVVDPTGCGDAFRAGLIYGIQHNYDWLTIGRMGNLMGALKVEHPGTQNQRFDFAEFNDQFKQYFGYAL

SEQ ID NO: 1411 - DNA, 963 bp, synthetic construct
  misc_feature 1..963: note = variant of adenosine kinase from Xanthemonas campestris
  source 1..963: mol_type = other DNA
atgcatcatcaccatcaccatggggggtccggtatgagtgcactcatttgcggttctttagcgtatgataacatcatggtgtttccggaccagttcaagaaccatattctgcccgatcgtgttcaccgcctcaatgtcagctttcttgtaccggacatgcgtcgtgaatttggaggctgtgccggcaacattgcgtacaatctgcatctgttgggtggtgctccgatcgtaatggctacggtgggccaagatttcggtccgtatcgcgagcacttcgaaactctgggcattgacttatcccgcgtcaagatcatcgatgatctgagtacaccgcaggccttcattaccaccgacatggatcaaaaccagattacggcgtttcacagcggcgcaatgatgcgttcgtacgaaaatcacgttcgtgatgtgccgggtgttaccttgggcctcgtaggtcctgatggacgcgagggcatgatccaaaatgccgaagaatttgctgctatgggcattccgttcatttttgacccaggtcaggcagtgcctctgttcaacggccccgaactgcgcgagtttatcgaacaggcggactatgtggtggtcaacgattacgaaagccgtcttcttcaagcccgtactggctggaacgagcaggacattgtttcacgcgtgcaggcgtatatcaccacgcaaggttcggctggagccgtggtacatacaccggagaagacctacgatattccggctgctaaaactcgtcgtgtcgttgatccaactggttgcggcgacgcgtttcgcgccggcctgatctatggtattcagcataattatgattggttgaccattggccgcatgggaaacttaatgggtgcgctgaaagtggaacaccctggcacccaaaatcagcgtttcgattttgccgaattcaacgaccagttctctcaatattttggctacgcgctc

SEQ ID NO: 1412 - protein, 321 aa, synthetic construct
  REGION 1..321: note = variant of adenosine kinase from Xanthemonas campestris
MHHHHHHGGSGMSALICGSLAYDNIMVFPDQFKNHILPDRVHRLNVSFLVPDMRREFGGCAGNIAYNLHLLGGAPIVMATVGQDFGPYREHFETLGIDLSRVKIIDDLSTPQAFITTDMDQNQITAFHSGAMMRSYENHVRDVPGVTLGLVGPDGREGMIQNAEEFAAMGIPFIFDPGQAVPLFNGPELREFIEQADYVVVNDYESRLLQARTGWNEQDIVSRVQAYITTQGSAGAVVHTPEKTYDIPAAKTRRVVDPTGCGDAFRAGLIYGIQHNYDWLTIGRMGNLMGALKVEHPGTQNQRFDFAEFNDQFSQYFGYAL

SEQ ID NO: 1413 - DNA, 963 bp, synthetic construct
  misc_feature 1..963: note = variant of adenosine kinase from Xanthemonas campestris
  source 1..963: mol_type = other DNA
atgcatcatcaccatcaccatggggggtccggtatgagtgcactcatttgcggttctttagcgtatgataacatcatggtgtttccggaccagttcaagaaccatattctgcccgatcgtgttcaccgcctcaatgtcagctttcttgtaccggacatgcgtcgtgaatttggaggctgtgccggcaacattgcgtacaatctgcatctgttgggtggtgctccgatcgtaatggctacggtgggccaagatttcggtccgtatcgcgagcacttcgaaactctgggcattgacttatcccgcgtcaagatcatcgatgatctgagtacaccgcaggccttcattaccaccgacatggatcaaaaccagattacggcgtttcacagcggcgcaatgatgcgttcgtacgaaaatcacgttcgtgatgtgccgggtgttaccttgggcctcgtaggtcctgatggacgcgagggcatgatccaaaatgccgaagaatttgctgctatgggcattccgttcatttttgacccaggtcaggcagtgcctctgttcaacggccccgaactgcgcgagtttatcgaacaggcggactatgtggtggtcaacgattacgaaagccgtcttcttcaagcccgtactggctggaacgagcaggacattgcgtcacgcgtgcaggcgtatatcaccacgcaaggttcggctggagccgtggtacatacaccggagaagacctacgatattccggctgctaaaactcgtcgtgtcgttgatccaactggttgcggcgacgcgtttcgcgccggcctgatctatggtattcagcataattatgattggttgaccattggccgcatgggaaacttaatgggtgcgctgaaagtggaacaccctggcacccaaaatcagcgtttcgattttgccgaattcaacgaccagttcaaacaatattttggctacgcgctc

SEQ ID NO: 1414 - protein, 321 aa, synthetic construct
  REGION 1..321: note = variant of adenosine kinase from Xanthemonas campestris
MHHHHHHGGSGMSALICGSLAYDNIMVFPDQFKNHILPDRVHRLNVSFLVPDMRREFGGCAGNIAYNLHLLGGAPIVMATVGQDFGPYREHFETLGIDLSRVKIIDDLSTPQAFITTDMDQNQITAFHSGAMMRSYENHVRDVPGVTLGLVGPDGREGMIQNAEEFAAMGIPFIFDPGQAVPLFNGPELREFIEQADYVVVNDYESRLLQARTGWNEQDIASRVQAYITTQGSAGAVVHTPEKTYDIPAAKTRRVVDPTGCGDAFRAGLIYGIQHNYDWLTIGRMGNLMGALKVEHPGTQNQRFDFAEFNDQFKQYFGYAL

SEQ ID NO: 1415 - DNA, 963 bp, synthetic construct
  misc_feature 1..963: note = variant of adenosine kinase from Xanthemonas campestris
  source 1..963: mol_type = other DNA
atgcatcatcaccatcaccatggggggtccggtatgagtgcactcatttgcggttctttagcgtatgataacatcatggtgtttccggaccagttcaagaaccatattctgcccgatcgtgttcaccgcctcaatgtcagctttcttgtaccggacatgcgtcgtgaatttggaggctgtgccggcaacattgcgtacaatctgcatctgttgggtggtgctccgatcgtaatggctacggtgggccaagatttcggtccgtatcgcgagcacttcgaaactctgggcattgacttatcccgcgtcaagatcatcgatgatctgagtacaccgcaggccttcattaccaccgacatggatcaaaaccagattacggcgtttcacagcggcgcaatgatgcgttcgtacgaaaatcacgttcgtgatgtgccgggtgttaccttgggcctcgtaggtcctgatggacgcgagggcatgatccaaaatgccgaagaatttgctgctatgaagattccgttcatttttgacccaggtcaggcagtgcctctgttcaacggccccgaactgcgcgagtttatcgaacaggcggactatgtggtggtcaacgattacgaaagccgtcttcttcaagcccgtactggctggaacgagcaggacattgtttcacgcgtgcaggcgtatatcaccacgcaaggttcggctggagccgtggtacatacaccggagaagacctacgatattccggctgctaaaactcgtcgtgtcgttgatccaactggttgcggcgacgcgtttcgcgccggcctgatctatggtattcagcataattatgattggttgaccattggccgcatgggaaacttaatgggtgcgctgaaagtggaacaccctggcacccaaaatcagcgtttcgattttgccgaattcaacgaccagttcaaacaatattttggctacgcgctc

SEQ ID NO: 1416 - protein, 321 aa, synthetic construct
  REGION 1..321: note = variant of adenosine kinase from Xanthemonas campestris
MHHHHHHGGSGMSALICGSLAYDNIMVFPDQFKNHILPDRVHRLNVSFLVPDMRREFGGCAGNIAYNLHLLGGAPIVMATVGQDFGPYREHFETLGIDLSRVKIIDDLSTPQAFITTDMDQNQITAFHSGAMMRSYENHVRDVPGVTLGLVGPDGREGMIQNAEEFAAMKIPFIFDPGQAVPLFNGPELREFIEQADYVVVNDYESRLLQARTGWNEQDIVSRVQAYITTQGSAGAVVHTPEKTYDIPAAKTRRVVDPTGCGDAFRAGLIYGIQHNYDWLTIGRMGNLMGALKVEHPGTQNQRFDFAEFNDQFKQYFGYAL

SEQ ID NO: 1417 - DNA, 963 bp, synthetic construct
  misc_feature 1..963: note = variant of adenosine kinase from Xanthemonas campestris
  source 1..963: mol_type = other DNA
atgcatcatcaccatcaccatggggggtccggtatgagtgcactcatttgcggttctttagcgtatgataacatcatggtgtttccggaccagttcaagaaccatattctgcccgatcatgttcaccgcctcaatgtcagctttcttgtaccggacatgcgtcgtgaatttggaggctgtgccggcaacattgcgtacaatctgcatctgttgggtggtgctccgatcgtaatggctacggtgggccaagatttcggtccgtatcgcgagcacttcgaaactctgggcattgacttatcccgcgtcaagatcatcgatgatctgagtacaccgcaggccttcattaccaccgacatggatcaaaaccagattacggcgtttcacagcggcgcaatgatgcgttcgtacgaaaatcacgttcgtgatgtgccgggtgttaccttgggcctcgtaggtcctgatggacgcgagggcatgatccaaaatgccgaagaatttgctgctatgggcattccgttcatttttgacccaggtcaggcagtgcctctgttcaacggccccgaactgcgcgagtttatcgaacaggcggactatgtggtggtcaacgattacgaaagccgtcttcttcaagcccgtactggctggaacgagcaggacattgtttcacgcgtgcaggcgtatatcaccacgcaaggttcggctggagccgtggtacatacaccggagaagacctacgatattccggctgctaaaactcgtcgtgtcgttgatccaactggttgcggcgacgcgtttcgcgccggcctgatctatggtattcagcataattatgattggttgaccattggccgcatgggaaacttaatgggtgcgctgaaagtggaacaccctggcacccaaaatcagcgtttcgattttgccgaattcaacgaccagttcaaacaatattttggctacgcgctc

SEQ ID NO: 1418 - protein, 321 aa, synthetic construct
  REGION 1..321: note = variant of adenosine kinase from Xanthemonas campestris
MHHHHHHGGSGMSALICGSLAYDNIMVFPDQFKNHILPDHVHRLNVSFLVPDMRREFGGCAGNIAYNLHLLGGAPIVMATVGQDFGPYREHFETLGIDLSRVKIIDDLSTPQAFITTDMDQNQITAFHSGAMMRSYENHVRDVPGVTLGLVGPDGREGMIQNAEEFAAMGIPFIFDPGQAVPLFNGPELREFIEQADYVVVNDYESRLLQARTGWNEQDIVSRVQAYITTQGSAGAVVHTPEKTYDIPAAKTRRVVDPTGCGDAFRAGLIYGIQHNYDWLTIGRMGNLMGALKVEHPGTQNQRFDFAEFNDQFKQYFGYAL

SEQ ID NO: 1419 - DNA, 963 bp, synthetic construct
  misc_feature 1..963: note = variant of adenosine kinase from Xanthemonas campestris
  source 1..963: mol_type = other DNA
atgcatcatcaccatcaccatggggggtccggtatgagtgcactcatttgcggttctttagcgtatgataacatcatggtgtttccggaccagttcaagaaccatattctgcccgatcgtgttcaccgcctcaatgtcagctttcttgtaccggacatgcgtcgtgaatttggaggctgtgccggcaacattgcgtacaatctgcatctgttgggtggtgctccgatcgtaatggctacggtgggccaagatttcggtccgtatcgcgagcacttcgaaactctgggcattgacttatcccgcgtcaagatcatcgatgatctgagtacaccgcaggccttcattaccaccgacatggatcaaaaccagattacggcgtttcacagcggcgcaatgatgcgttcgtacgaaaatcacgttcgtgatgtgccgggtgttaccttgggcctcgtaggtcctgatggacgcgagggcatgatccaaaatgccgaagaatttgctgctatgggcattccgttcatttttgacccaggtcaggcagtgcctctgttcaacggccccgaactgcgcgagtttatcgaacaggcggactatgtggtggtcaacgattacgaaagccgtcttcttcaagcccgtactggctggaacgagcaggacattgtttcacgcgtgcaggcgtatatcaccacgcaaggttcggctggagccgtggtacatacaccggagaagacctacgatattccggctgctaaaactcgtcgtgtcgttgatccaactggttgcggcgacgcgtttcgcgccggcctgatctatggtattcagcataattatgattggttgaccattggccgcatgggaaacttaatgggtgcgctgaaagtggaacaccctggcacccaaaatcagcgtttcgattttgccgaattcaacgaccagttcgtgcaatattttggctacgcgctc

SEQ ID NO: 1420 - protein, 321 aa, synthetic construct
  REGION 1..321: note = variant of adenosine kinase from Xanthemonas campestris
MHHHHHHGGSGMSALICGSLAYDNIMVFPDQFKNHILPDRVHRLNVSFLVPDMRREFGGCAGNIAYNLHLLGGAPIVMATVGQDFGPYREHFETLGIDLSRVKIIDDLSTPQAFITTDMDQNQITAFHSGAMMRSYENHVRDVPGVTLGLVGPDGREGMIQNAEEFAAMGIPFIFDPGQAVPLFNGPELREFIEQADYVVVNDYESRLLQARTGWNEQDIVSRVQAYITTQGSAGAVVHTPEKTYDIPAAKTRRVVDPTGCGDAFRAGLIYGIQHNYDWLTIGRMGNLMGALKVEHPGTQNQRFDFAEFNDQFVQYFGYAL

SEQ ID NO: 1421 - DNA, 963 bp, synthetic construct
  misc_feature 1..963: note = variant of adenosine kinase from Xanthemonas campestris
  source 1..963: mol_type = other DNA
atgcatcatcaccatcaccatggggggtccggtatgagtgcactcatttgcggttctttagcgtatgataacatcatggtgtttccggaccagttcaagaaccatattctgcccgatcgtgttcaccgcctcaatgtcagctttatggtaccggacatgcgtcgtgaatttggaggctgtgccggcaacattgcgtacaatctgcatctgttgggtggtgctccgatcgtaatggctacggtgggccaagatttcggtccgtatcgcgagcacttcgaaactctgggcattgacttatcccgcgtcaagatcatcgatgatctgagtacaccgcaggccttcattaccaccgacatggatcaaaaccagattacggcgtttcacagcggcgcaatgatgcgttcgtacgaaaatcacgttcgtgatgtgccgggtgttaccttgggcctcgtaggtcctgatggacgcgagggcatgatccaaaatgccgaagaatttgctgctatgggcattccgttcatttttgacccaggtcaggcagtgcctctgttcaacggccccgaactgcgcgagtttatcgaacaggcggactatgtggtggtcaacgattacgaaagccgtcttcttcaagcccgtactggctggaacgagcaggacattgtttcacgcgtgcaggcgtatatcaccacgcaaggttcggctggagccgtggtacatacaccggagaagacctacgatattccggctgctaaaactcgtcgtgtcgttgatccaactggttgcggcgacgcgtttcgcgccggcctgatctatggtattcagcataattatgattggttgaccattggccgcatgggaaacttaatgggtgcgctgaaagtggaacaccctggcacccaaaatcagcgtttcgattttgccgaattcaacgaccagttcaaacaatattttggctacgcgctc

SEQ ID NO: 1422 - protein, 321 aa, synthetic construct
  REGION 1..321: note = variant of adenosine kinase from Xanthemonas campestris
MHHHHHHGGSGMSALICGSLAYDNIMVFPDQFKNHILPDRVHRLNVSFMVPDMRREFGGCAGNIAYNLHLLGGAPIVMATVGQDFGPYREHFETLGIDLSRVKIIDDLSTPQAFITTDMDQNQITAFHSGAMMRSYENHVRDVPGVTLGLVGPDGREGMIQNAEEFAAMGIPFIFDPGQAVPLFNGPELREFIEQADYVVVNDYESRLLQARTGWNEQDIVSRVQAYITTQGSAGAVVHTPEKTYDIPAAKTRRVVDPTGCGDAFRAGLIYGIQHNYDWLTIGRMGNLMGALKVEHPGTQNQRFDFAEFNDQFKQYFGYAL

SEQ ID NO: 1423 - DNA, 963 bp, synthetic construct
  misc_feature 1..963: note = variant of adenosine kinase from Xanthemonas campestris
  source 1..963: mol_type = other DNA
atgcatcatcaccatcaccatggggggtccggtatgagtgcactcatttgcggttctttagcgtatgataacatcatggtgtttccggaccagttcaagaaccatattctgcccgatcgtgttcaccgcctcaatgtcagctttcttgtaccggacatgcgtcgtgaatttggaggctgtgccggcaacattgcgtacaatctgcatctgttgggttgtgctccgatcgtaatggctacggtgggccaagatttcggtccgtatcgcgagcacttcgaaactctgggcattgacttatcccgcgtcaagatcatcgatgatctgagtacaccgcaggccttcattaccaccgacatggatcaaaaccagattacggcgtttcacagcggcgcaatgatgcgttcgtacgaaaatcacgttcgtgatgtgccgggtgttaccttgggcctcgtaggtcctgatggacgcgagggcatgatccaaaatgccgaagaatttgctgctatgggcattccgttcatttttgacccaggtcaggcagtgcctctgttcaacggccccgaactgcgcgagtttatcgaacaggcggactatgtggtggtcaacgattacgaaagccgtcttcttcaagcccgtactggctggaacgagcaggacattgtttcacgcgtgcaggcgtatatcaccacgcaaggttcggctggagccgtggtacatacaccggagaagacctacgatattccggctgctaaaactcgtcgtgtcgttgatccaactggttgcggcgacgcgtttcgcgccggcctgatctatggtattcagcataattatgattggttgaccattggccgcatgggaaacttaatgggtgcgctgaaagtggaacaccctggcacccaaaatcagcgtttcgattttgccgaattcaacgaccagttcaaacaatattttggctacgcgctc

SEQ ID NO: 1424 - protein, 321 aa, synthetic construct
  REGION 1..321: note = variant of adenosine kinase from Xanthemonas campestris
MHHHHHHGGSGMSALICGSLAYDNIMVFPDQFKNHILPDRVHRLNVSFLVPDMRREFGGCAGNIAYNLHLLGCAPIVMATVGQDFGPYREHFETLGIDLSRVKIIDDLSTPQAFITTDMDQNQITAFHSGAMMRSYENHVRDVPGVTLGLVGPDGREGMIQNAEEFAAMGIPFIFDPGQAVPLFNGPELREFIEQADYVVVNDYESRLLQARTGWNEQDIVSRVQAYITTQGSAGAVVHTPEKTYDIPAAKTRRVVDPTGCGDAFRAGLIYGIQHNYDWLTIGRMGNLMGALKVEHPGTQNQRFDFAEFNDQFKQYFGYAL

SEQ ID NO: 1425 - DNA, 963 bp, synthetic construct
  misc_feature 1..963: note = variant of adenosine kinase from Xanthemonas campestris
  source 1..963: mol_type = other DNA
atgcatcatcaccatcaccatggggggtccggtatgagtgcactcatttgcggttctttagcgtatgataacatcatggtgtttccggaccagttcaagaaccatattctgcccgatcgtgttcaccgcctcaatgtcagctttcttgtaccggacatgcgtcgtgaatttggaggctgtgccggcaacattgcgtacaatctgcatctgttgggtggtgctccgatcgtaatggctacggtgggccaagatttcggtccgtatcgcgagcacttcgaaactctgggcattgacttatcccgcgtcaagatcatcgatgatctgagtacaccgcaggccttcattaccaccgacatggatcaaaaccagattacggcgtttcacagcggcgcaatgatgcgttcgtacgaaaatcacgttcgtgatgtgccgggtgttaccttgggcctcgtaggtcctgatggacgcgagggcatgatccaaaatgccgaagaatttgctgctatgggcattccgttcatttttgacccaggtcaggcagtgcctctgttcaacggccccgaactgcgcgagtttatcgaacaggcggactatgtggtggtcaacgattacgaaagccgtcttcttcaagcccgtactggctggaacgagcaggacattgtttcacgcgtgcaggcgtatatcaccacgcaaggttcggctggagccgtggtacatacaccggagaagacctacgatattccggctgctaaaactcgtcgtgtcgttgatccaactggttgcggcgacgcgtttcgcgccggcctgatctatggtattcagcataattatgattggttgaccattggccgcatgggaaacttaatgggtgcgctgaaagtggaacaccctggcacccaaaatcagcgtttcgattttgccgaattcaacgaccagttccagcaatattttggctacgcgctc

SEQ ID NO: 1426 - protein, 321 aa, synthetic construct
  REGION 1..321: note = variant of adenosine kinase from Xanthemonas campestris
MHHHHHHGGSGMSALICGSLAYDNIMVFPDQFKNHILPDRVHRLNVSFLVPDMRREFGGCAGNIAYNLHLLGGAPIVMATVGQDFGPYREHFETLGIDLSRVKIIDDLSTPQAFITTDMDQNQITAFHSGAMMRSYENHVRDVPGVTLGLVGPDGREGMIQNAEEFAAMGIPFIFDPGQAVPLFNGPELREFIEQADYVVVNDYESRLLQARTGWNEQDIVSRVQAYITTQGSAGAVVHTPEKTYDIPAAKTRRVVDPTGCGDAFRAGLIYGIQHNYDWLTIGRMGNLMGALKVEHPGTQNQRFDFAEFNDQFQQYFGYAL

SEQ ID NO: 1427 - DNA, 963 bp, synthetic construct
  misc_feature 1..963: note = variant of adenosine kinase from Xanthemonas campestris
  source 1..963: mol_type = other DNA
atgcatcatcaccatcaccatggggggtccggtatgagtgcactcatttgcggttctttagcgtatgataacatcatggtgtttccggaccagttcaagaaccatattctgcccgatcgtgttcaccgcctcaatgtcagctttcttgtaccggacatgcgtcgtgaatttggaggctgtgccggcaacattgcgtacaatctgcatctgttgggtggtgctccgatcgtaatggctacggtgggccaagatttcggtccgtatcgcgagcacttcgaaactctgggcattgacttatcccgcgtcaagatcatcgatgatctgagtacaccgcaggccttcattaccaccgacatggatcaaaaccagattacggcgtttcacagcggcgcaatgatgcgttcgtacgaaaatcacgttcgtgatgtgccgggtgttaccttgggcctcgtaggtcctgatggacgcgagggcatgatccaaaatgccgaagaatttgctgctatgggcattccgttcatttttgacccaggtcaggcagtgcctctgttcaacggccccgaactgcgcgagtttatcgcgcaggcggactatgtggtggtcaacgattacgaaagccgtcttcttcaagcccgtactggctggaacgagcaggacattgtttcacgcgtgcaggcgtatatcaccacgcaaggttcggctggagccgtggtacatacaccggagaagacctacgatattccggctgctaaaactcgtcgtgtcgttgatccaactggttgcggcgacgcgtttcgcgccggcctgatctatggtattcagcataattatgattggttgaccattggccgcatgggaaacttaatgggtgcgctgaaagtggaacaccctggcacccaaaatcagcgtttcgattttgccgaattcaacgaccagttcaaacaatattttggctacgcgctc

SEQ ID NO: 1428 - protein, 321 aa, synthetic construct
  REGION 1..321: note = variant of adenosine kinase from Xanthemonas campestris
MHHHHHHGGSGMSALICGSLAYDNIMVFPDQFKNHILPDRVHRLNVSFLVPDMRREFGGCAGNIAYNLHLLGGAPIVMATVGQDFGPYREHFETLGIDLSRVKIIDDLSTPQAFITTDMDQNQITAFHSGAMMRSYENHVRDVPGVTLGLVGPDGREGMIQNAEEFAAMGIPFIFDPGQAVPLFNGPELREFIAQADYVVVNDYESRLLQARTGWNEQDIVSRVQAYITTQGSAGAVVHTPEKTYDIPAAKTRRVVDPTGCGDAFRAGLIYGIQHNYDWLTIGRMGNLMGALKVEHPGTQNQRFDFAEFNDQFKQYFGYAL

SEQ ID NO: 1429 - DNA, 963 bp, synthetic construct
  misc_feature 1..963: note = variant of adenosine kinase from Xanthemonas campestris
  source 1..963: mol_type = other DNA
atgcatcatcaccatcaccatggggggtccggtatgagtgcactcatttgcggttctttagcgtatgataacatcatggtgtttccggaccagttcaagaaccatattctgcccgatcgtgttcaccgcctcaatgtcagctttcttgtaccggacatgcgtcgtgaatttggaggctgtgccggcaacattgcgtacaatctgcatctgttgggtggtgctccgatcgtaatggctacggtgggccaagatttcggtccgtatcgcgagcacttcgaaactctgggcattgacttatcccgcgtcaagatcatcgatgatctgagtacaccgcaggccttcattaccaccgacatggatcaaaaccagattacggcgtttcacagcggcgcaatgatgcgttcgtacgaaaatcacgttcgtgatgtgccgggtgttaccttgggcctcgtaggtcctgatggacgcgagggcatgatccaaaatgccgaagaatttgctgctatgggcattccgttcatttttgacccaggtcaggcagtgcctctgttcaacggccccgaactgcgcgagtttatcgaagtggcggactatgtggtggtcaacgattacgaaagccgtcttcttcaagcccgtactggctggaacgagcaggacattgtttcacgcgtgcaggcgtatatcaccacgcaaggttcggctggagccgtggtacatacaccggagaagacctacgatattccggctgctaaaactcgtcgtgtcgttgatccaactggttgcggcgacgcgtttcgcgccggcctgatctatggtattcagcataattatgattggttgaccattggccgcatgggaaacttaatgggtgcgctgaaagtggaacaccctggcacccaaaatcagcgtttcgattttgccgaattcaacgaccagttcaaacaatattttggctacgcgctc

SEQ ID NO: 1430 - protein, 321 aa, synthetic construct
  REGION 1..321: note = variant of adenosine kinase from Xanthemonas campestris
MHHHHHHGGSGMSALICGSLAYDNIMVFPDQFKNHILPDRVHRLNVSFLVPDMRREFGGCAGNIAYNLHLLGGAPIVMATVGQDFGPYREHFETLGIDLSRVKIIDDLSTPQAFITTDMDQNQITAFHSGAMMRSYENHVRDVPGVTLGLVGPDGREGMIQNAEEFAAMGIPFIFDPGQAVPLFNGPELREFIEVADYVVVNDYESRLLQARTGWNEQDIVSRVQAYITTQGSAGAVVHTPEKTYDIPAAKTRRVVDPTGCGDAFRAGLIYGIQHNYDWLTIGRMGNLMGALKVEHPGTQNQRFDFAEFNDQFKQYFGYAL

SEQ ID NO: 1431 - DNA, 963 bp, synthetic construct
  misc_feature 1..963: note = variant of adenosine kinase from Xanthemonas campestris
  source 1..963: mol_type = other DNA
atgcatcatcaccatcaccatggggggtccggtatgagtgcactcatttgcggttctttagcgtatgataacatcatggtgtttccggaccagttcaagaaccatattctgcccgatcgtgttcaccgcctcaatgtcagctttcttgtaccggacatgcgtcgtgaatttggaggctgtgccggcaacattgcgtacaatctgcatctgttgggtggtgctccgatcgtaatggctacggtgggccaagatttcggtccgtatcgcgagcacttcgaaactctgggcattgacttatcccgcgtcaagatcatcgatgatctgagtacaccgcaggccttcattaccaccgacatggatcaaaaccagattacggcgtttcacagcggcgcaatgatgcgttcgtacgaaaatcacgttcgtgatgtgccgggtgttaatttgggcctcgtaggtcctgatggacgcgagggcatgatccaaaatgccgaagaatttgctgctatgggcattccgttcatttttgacccaggtcaggcagtgcctctgttcaacggccccgaactgcgcgagtttatcgaacaggcggactatgtggtggtcaacgattacgaaagccgtcttcttcaagcccgtactggctggaacgagcaggacattgtttcacgcgtgcaggcgtatatcaccacgcaaggttcggctggagccgtggtacatacaccggagaagacctacgatattccggctgctaaaactcgtcgtgtcgttgatccaactggttgcggcgacgcgtttcgcgccggcctgatctatggtattcagcataattatgattggttgaccattggccgcatgggaaacttaatgggtgcgctgaaagtggaacaccctggcacccaaaatcagcgtttcgattttgccgaattcaacgaccagttcaaacaatattttggctacgcgctc

SEQ ID NO: 1432 - protein, 321 aa, synthetic construct
  REGION 1..321: note = variant of adenosine kinase from Xanthemonas campestris
MHHHHHHGGSGMSALICGSLAYDNIMVFPDQFKNHILPDRVHRLNVSFLVPDMRREFGGCAGNIAYNLHLLGGAPIVMATVGQDFGPYREHFETLGIDLSRVKIIDDLSTPQAFITTDMDQNQITAFHSGAMMRSYENHVRDVPGVNLGLVGPDGREGMIQNAEEFAAMGIPFIFDPGQAVPLFNGPELREFIEQADYVVVNDYESRLLQARTGWNEQDIVSRVQAYITTQGSAGAVVHTPEKTYDIPAAKTRRVVDPTGCGDAFRAGLIYGIQHNYDWLTIGRMGNLMGALKVEHPGTQNQRFDFAEFNDQFKQYFGYAL

SEQ ID NO: 1433 - DNA, 963 bp, synthetic construct
  misc_feature 1..963: note = variant of adenosine kinase from Xanthemonas campestris
  source 1..963: mol_type = other DNA
atgcatcatcaccatcaccatggggggtccggtatgagtgcactcatttgcggttctttagcgtatgataacatcatggtgtttccggaccagttcaagaaccatattctgcccgatcgtgttcaccgcctcaatgtcagctttcttgtaccggacatgcgtcgtgaatttggaggctgtgccggcaacattgcgtacaatctgcatctgttgggtggtgctccgatcgtaatggctacggtgggccaagatttcggtccgtatcgcgagcacttcgaaactctgggcattgacttatcccgcgtcaagatcatcgatgatctgagtacaccgcaggccttcattaccaccgacatggatcaaaaccagattacggcgtttcacagcggcgcaatgatgcgttcgtacgaaaatcacgttcgtgatgtgccgggtgttaccttgggcctcgtaggtcctgatggacgcgagggcatgatccaaaatgccgaagaatttgctgctatgggcattccgttcatttttgacccaggtcaggcagtgcctctgttcaacggccccgaactgcgcgagtttatcgaacaggcggactatgtggtggtcaacgattacgaaagccgtcttcttcaagcccgtactggctggaacgagctggacattgtttcacgcgtgcaggcgtatatcaccacgcaaggttcggctggagccgtggtacatacaccggagaagacctacgatattccggctgctaaaactcgtcgtgtcgttgatccaactggttgcggcgacgcgtttcgcgccggcctgatctatggtattcagcataattatgattggttgaccattggccgcatgggaaacttaatgggtgcgctgaaagtggaacaccctggcacccaaaatcagcgtttcgattttgccgaattcaacgaccagttcaaacaatattttggctacgcgctc

SEQ ID NO: 1434 - protein, 321 aa, synthetic construct
  REGION 1..321: note = variant of adenosine kinase from Xanthemonas campestris
MHHHHHHGGSGMSALICGSLAYDNIMVFPDQFKNHILPDRVHRLNVSFLVPDMRREFGGCAGNIAYNLHLLGGAPIVMATVGQDFGPYREHFETLGIDLSRVKIIDDLSTPQAFITTDMDQNQITAFHSGAMMRSYENHVRDVPGVTLGLVGPDGREGMIQNAEEFAAMGIPFIFDPGQAVPLFNGPELREFIEQADYVVVNDYESRLLQARTGWNELDIVSRVQAYITTQGSAGAVVHTPEKTYDIPAAKTRRVVDPTGCGDAFRAGLIYGIQHNYDWLTIGRMGNLMGALKVEHPGTQNQRFDFAEFNDQFKQYFGYAL

SEQ ID NO: 1435 - DNA, 963 bp, synthetic construct
  misc_feature 1..963: note = variant of adenosine kinase from Xanthemonas campestris
  source 1..963: mol_type = other DNA
atgcatcatcaccatcaccatggggggtccggtatgagtgcactcatttgcggttctttagcgtatgataacatcatggtgtttccggaccagttcaagaaccatattctgcccgatcgtgttcaccgcctcaatgtcagctttcttgtaccggacatgcgtcgtgaatttggaggctgtgccggcaacattgcgtacaatctgcatctgttgggtggtgctccgatcgtaatggctacggtgggccaagatttcggtccgtatcgcgagcacttcgaaactctgggcattgacttatcccgcgtcaagatcatcgatgatctgagtacaccgcaggccttcattaccaccgacatggatcaaaaccagattacggcgtttcacagcggcgcaatgatgcgttcgtacgaaaatcacgttcgtgatgtgccgggtgttaccttgggcctcgtaggtcctgatggacgcgagggcatgatccaaaatgccgaagaatttgctgctatgggcattccgttcatttttgacccaggtcaggcagtgcctctgttcaacggccccgaactgcgcgagtttatcgaacaggcggactatgtggtggtcaacgattacgaaagccgtcttcttcaagcccgtactggctgggttgagcaggacattgtttcacgcgtgcaggcgtatatcaccacgcaaggttcggctggagccgtggtacatacaccggagaagacctacgatattccggctgctaaaactcgtcgtgtcgttgatccaactggttgcggcgacgcgtttcgcgccggcctgatctatggtattcagcataattatgattggttgaccattggccgcatgggaaacttaatgggtgcgctgaaagtggaacaccctggcacccaaaatcagcgtttcgattttgccgaattcaacgaccagttcaaacaatattttggctacgcgctc

SEQ ID NO: 1436 - protein, 321 aa, synthetic construct
  REGION 1..321: note = variant of adenosine kinase from Xanthemonas campestris
MHHHHHHGGSGMSALICGSLAYDNIMVFPDQFKNHILPDRVHRLNVSFLVPDMRREFGGCAGNIAYNLHLLGGAPIVMATVGQDFGPYREHFETLGIDLSRVKIIDDLSTPQAFITTDMDQNQITAFHSGAMMRSYENHVRDVPGVTLGLVGPDGREGMIQNAEEFAAMGIPFIFDPGQAVPLFNGPELREFIEQADYVVVNDYESRLLQARTGWVEQDIVSRVQAYITTQGSAGAVVHTPEKTYDIPAAKTRRVVDPTGCGDAFRAGLIYGIQHNYDWLTIGRMGNLMGALKVEHPGTQNQRFDFAEFNDQFKQYFGYAL

SEQ ID NO: 1437 - DNA, 963 bp, synthetic construct
  misc_feature 1..963: note = variant of adenosine kinase from Xanthemonas campestris
  source 1..963: mol_type = other DNA
atgcatcatcaccatcaccatggggggtccggtatgagtgcactcatttgcggttctttagcgtatgataacatcatggtgtttccggaccagttcaagaaccatattctgcccgatcgtgttcaccgcctcaatgtcagctttcttgtaccggacatgcgtcgtgaatttggaggctgtgccggcaacattgcgtacaatctgcatctgttgggtggtgctccgatcgtaatggctacggtgggccaagatttcggtccgtatcgcagtcacttcgaaactctgggcattgacttatcccgcgtcaagatcatcgatgatctgagtacaccgcaggccttcattaccaccgacatggatcaaaaccagattacggcgtttcacagcggcgcaatgatgcgttcgtacgaaaatcacgttcgtgatgtgccgggtgttaccttgggcctcgtaggtcctgatggacgcgagggcatgatccaaaatgccgaagaatttgctgctatgggcattccgttcatttttgacccaggtcaggcagtgcctctgttcaacggccccgaactgcgcgagtttatcgaacaggcggactatgtggtggtcaacgattacgaaagccgtcttcttcaagcccgtactggctggaacgagcaggacattgtttcacgcgtgcaggcgtatatcaccacgcaaggttcggctggagccgtggtacatacaccggagaagacctacgatattccggctgctaaaactcgtcgtgtcgttgatccaactggttgcggcgacgcgtttcgcgccggcctgatctatggtattcagcataattatgattggttgaccattggccgcatgggaaacttaatgggtgcgctgaaagtggaacaccctggcacccaaaatcagcgtttcgattttgccgaattcaacgaccagttcaaacaatattttggctacgcgctc

SEQ ID NO: 1438 - protein, 321 aa, synthetic construct
  REGION 1..321: note = variant of adenosine kinase from Xanthemonas campestris
MHHHHHHGGSGMSALICGSLAYDNIMVFPDQFKNHILPDRVHRLNVSFLVPDMRREFGGCAGNIAYNLHLLGGAPIVMATVGQDFGPYRSHFETLGIDLSRVKIIDDLSTPQAFITTDMDQNQITAFHSGAMMRSYENHVRDVPGVTLGLVGPDGREGMIQNAEEFAAMGIPFIFDPGQAVPLFNGPELREFIEQADYVVVNDYESRLLQARTGWNEQDIVSRVQAYITTQGSAGAVVHTPEKTYDIPAAKTRRVVDPTGCGDAFRAGLIYGIQHNYDWLTIGRMGNLMGALKVEHPGTQNQRFDFAEFNDQFKQYFGYAL

SEQ ID NO: 1439 - DNA, 963 bp, synthetic construct
  misc_feature 1..963: note = variant of adenosine kinase from Xanthemonas campestris
  source 1..963: mol_type = other DNA
atgcatcatcaccatcaccatggggggtccggtatgagtgcactcatttgcggttctttagcgtatgataacatcatggtgtttccggaccagttcaagaaccatattctgcccgatcgtgttcaccgcctcaatgtcagctttcttgtaccggacatgcgtcgtgaatttggaggctgtgccggcaacattgcgtacaatctgcatctgttgggtggtgctccgatcgtaatggctacggtgggccaagatttcggtccgtatttggagcacttcgaaactctgggcattgacttatcccgcgtcaagatcatcgatgatctgagtacaccgcaggccttcattaccaccgacatggatcaaaaccagattacggcgtttcacagcggcgcaatgatgcgttcgtacgaaaatcacgttcgtgatgtgccgggtgttaccttgggcctcgtaggtcctgatggacgcgagggcatgatccaaaatgccgaagaatttgctgctatgggcattccgttcatttttgacccaggtcaggcagtgcctctgttcaacggccccgaactgcgcgagtttatcgaacaggcggactatgtggtggtcaacgattacgaaagccgtcttcttcaagcccgtactggctggaacgagcaggacattgtttcacgcgtgcaggcgtatatcaccacgcaaggttcggctggagccgtggtacatacaccggagaagacctacgatattccggctgctaaaactcgtcgtgtcgttgatccaactggttgcggcgacgcgtttcgcgccggcctgatctatggtattcagcataattatgattggttgaccattggccgcatgggaaacttaatgggtgcgctgaaagtggaacaccctggcacccaaaatcagcgtttcgattttgccgaattcaacgaccagttcaaacaatattttggctacgcgctc

SEQ ID NO: 1440 - protein, 321 aa, synthetic construct
  REGION 1..321: note = variant of adenosine kinase from Xanthemonas campestris
MHHHHHHGGSGMSALICGSLAYDNIMVFPDQFKNHILPDRVHRLNVSFLVPDMRREFGGCAGNIAYNLHLLGGAPIVMATVGQDFGPYLEHFETLGIDLSRVKIIDDLSTPQAFITTDMDQNQITAFHSGAMMRSYENHVRDVPGVTLGLVGPDGREGMIQNAEEFAAMGIPFIFDPGQAVPLFNGPELREFIEQADYVVVNDYESRLLQARTGWNEQDIVSRVQAYITTQGSAGAVVHTPEKTYDIPAAKTRRVVDPTGCGDAFRAGLIYGIQHNYDWLTIGRMGNLMGALKVEHPGTQNQRFDFAEFNDQFKQYFGYAL

SEQ ID NO: 1441 - DNA, 963 bp, synthetic construct
  misc_feature 1..963: note = variant of adenosine kinase from Xanthemonas campestris
  source 1..963: mol_type = other DNA
atgcatcatcaccatcaccatggggggtccggtatgagtgcactcatttgcggttctttagcgtatgataacatcatggtgtttccggaccagttcaagaaccatattctgcccgatcgtgttgatcgcctcaatgtcagctttcttgtaccggacatgcgtcgtgaatttggaggctgtgccggcaacattgcgtacaatctgcatctgttgggtggtgctccgatcgtaatggctacggtgggccaagatttcggtccgtatcgcgagcacttcgaaactctgggcattgacttatcccgcgtcaagatcatcgatgatctgagtacaccgcaggccttcattaccaccgacatggatcaaaaccagattacggcgtttcacagcggcgcaatgatgcgttcgtacgaaaatcacgttcgtgatgtgccgggtgttaccttgggcctcgtaggtcctgatggacgcgagggcatgatccaaaatgccgaagaatttgctgctatgggcattccgttcatttttgacccaggtcaggcagtgcctctgttcaacggccccgaactgcgcgagtttatcgaacaggcggactatgtggtggtcaacgattacgaaagccgtcttcttcaagcccgtactggctggaacgagcaggacattgtttcacgcgtgcaggcgtatatcaccacgcaaggttcggctggagccgtggtacatacaccggagaagacctacgatattccggctgctaaaactcgtcgtgtcgttgatccaactggttgcggcgacgcgtttcgcgccggcctgatctatggtattcagcataattatgattggttgaccattggccgcatgggaaacttaatgggtgcgctgaaagtggaacaccctggcacccaaaatcagcgtttcgattttgccgaattcaacgaccagttcaaacaatattttggctacgcgctc

SEQ ID NO: 1442 - protein, 321 aa, synthetic construct
  REGION 1..321: note = variant of adenosine kinase from Xanthemonas campestris
MHHHHHHGGSGMSALICGSLAYDNIMVFPDQFKNHILPDRVDRLNVSFLVPDMRREFGGCAGNIAYNLHLLGGAPIVMATVGQDFGPYREHFETLGIDLSRVKIIDDLSTPQAFITTDMDQNQITAFHSGAMMRSYENHVRDVPGVTLGLVGPDGREGMIQNAEEFAAMGIPFIFDPGQAVPLFNGPELREFIEQADYVVVNDYESRLLQARTGWNEQDIVSRVQAYITTQGSAGAVVHTPEKTYDIPAAKTRRVVDPTGCGDAFRAGLIYGIQHNYDWLTIGRMGNLMGALKVEHPGTQNQRFDFAEFNDQFKQYFGYAL

SEQ ID NO: 1443 - DNA, 963 bp, synthetic construct
  misc_feature 1..963: note = variant of adenosine kinase from Xanthemonas campestris
  source 1..963: mol_type = other DNA
atgcatcatcaccatcaccatggggggtccggtatgagtgcactcatttgcggttctttagcgtatgataacatcatggtgtttccggaccagttcaagaaccatattctgcccgatcgtgttcaccgcctcaatgtcagctttcttgtaccggacatgcgtcgtgaatttggaggctgtgccggcaacattgcgtacaatctgcatctgttgggtggtgctccgatcgtaatggctacggtgggccaagatttcggtccgtatcgcgagcacttcgaaactctgggcattgacttatcccgcgtcaagatcatcgatgatctgagtacaccgcaggccttcattaccaccgacatggatcaaaaccagattacggcgtttcacagcggcgcaatgatgcgttcgtacgaaaatcacgttcgtgatgtgccgggtgttaccttgggcctcgtaggtcctgatggacgcgagggcatgatccaaaatgccgaagaatttgctgctatgggcattccgttcatttttgacccaggtcaggcagtgcctctgttcaacggccccgaactgcgcgagtttatcgaacaggcggactatgtggtggtcaacgattacgaaagccgtcttcttcaacatcgtactggctggaacgagcaggacattgtttcacgcgtgcaggcgtatatcaccacgcaaggttcggctggagccgtggtacatacaccggagaagacctacgatattccggctgctaaaactcgtcgtgtcgttgatccaactggttgcggcgacgcgtttcgcgccggcctgatctatggtattcagcataattatgattggttgaccattggccgcatgggaaacttaatgggtgcgctgaaagtggaacaccctggcacccaaaatcagcgtttcgattttgccgaattcaacgaccagttcaaacaatattttggctacgcgctc

SEQ ID NO: 1444 - protein, 321 aa, synthetic construct
  REGION 1..321: note = variant of adenosine kinase from Xanthemonas campestris
MHHHHHHGGSGMSALICGSLAYDNIMVFPDQFKNHILPDRVHRLNVSFLVPDMRREFGGCAGNIAYNLHLLGGAPIVMATVGQDFGPYREHFETLGIDLSRVKIIDDLSTPQAFITTDMDQNQITAFHSGAMMRSYENHVRDVPGVTLGLVGPDGREGMIQNAEEFAAMGIPFIFDPGQAVPLFNGPELREFIEQADYVVVNDYESRLLQHRTGWNEQDIVSRVQAYITTQGSAGAVVHTPEKTYDIPAAKTRRVVDPTGCGDAFRAGLIYGIQHNYDWLTIGRMGNLMGALKVEHPGTQNQRFDFAEFNDQFKQYFGYAL

SEQ ID NO: 1445 - DNA, 963 bp, synthetic construct
  misc_feature 1..963: note = variant of adenosine kinase from Xanthemonas campestris
  source 1..963: mol_type = other DNA
atgcatcatcaccatcaccatggggggtccggtatgagtgcactcatttgcggttctttagcgtatgataacatcatggtgtttccggaccagttcaagaaccatattctgcccgatcgtgttcaccgcctcaatgtcagctttcttgtaccggacatgcgtcgtgaatttggaggctgtgccggcaacattgcgtacaatctgcatctgttgggtggtgctccgatcgtaatggctacggtgggccaagatttcggtccgtatcgcacgcacttcgaaactctgggcattgacttatcccgcgtcaagatcatcgatgatctgagtacaccgcaggccttcattaccaccgacatggatcaaaaccagattacggcgtttcacagcggcgcaatgatgcgttcgtacgaaaatcacgttcgtgatgtgccgggtgttaccttgggcctcgtaggtcctgatggacgcgagggcatgatccaaaatgccgaagaatttgctgctatgggcattccgttcatttttgacccaggtcaggcagtgcctctgttcaacggccccgaactgcgcgagtttatcgaacaggcggactatgtggtggtcaacgattacgaaagccgtcttcttcaagcccgtactggctggaacgagcaggacattgtttcacgcgtgcaggcgtatatcaccacgcaaggttcggctggagccgtggtacatacaccggagaagacctacgatattccggctgctaaaactcgtcgtgtcgttgatccaactggttgcggcgacgcgtttcgcgccggcctgatctatggtattcagcataattatgattggttgaccattggccgcatgggaaacttaatgggtgcgctgaaagtggaacaccctggcacccaaaatcagcgtttcgattttgccgaattcaacgaccagttcaaacaatattttggctacgcgctc

SEQ ID NO: 1446 - protein, 321 aa, synthetic construct
  REGION 1..321: note = variant of adenosine kinase from Xanthemonas campestris
MHHHHHHGGSGMSALICGSLAYDNIMVFPDQFKNHILPDRVHRLNVSFLVPDMRREFGGCAGNIAYNLHLLGGAPIVMATVGQDFGPYRTHFETLGIDLSRVKIIDDLSTPQAFITTDMDQNQITAFHSGAMMRSYENHVRDVPGVTLGLVGPDGREGMIQNAEEFAAMGIPFIFDPGQAVPLFNGPELREFIEQADYVVVNDYESRLLQARTGWNEQDIVSRVQAYITTQGSAGAVVHTPEKTYDIPAAKTRRVVDPTGCGDAFRAGLIYGIQHNYDWLTIGRMGNLMGALKVEHPGTQNQRFDFAEFNDQFKQYFGYAL

SEQ ID NO: 1447 - DNA, 963 bp, synthetic construct
  misc_feature 1..963: note = variant of adenosine kinase from Xanthemonas campestris
  source 1..963: mol_type = other DNA
atgcatcatcaccatcaccatggggggtccggtatgagtgcactcatttgcggttctttagcgtatgataacatcatggtgtttccggaccagttcaagaaccatattctgcccgatcgtgttcaccgcctcaatgtcagctttcttgtaccggacatgcgtcgtgaatttggaggctgtgccggcaacattgcgtacaatctgcatctgttgggtggtgctccgatcgtaatggctacggtgggccaagatttcggtccgtatcgcgagcacttcgaaactctgggcattgacttatcccgcgtcaagatcatcatggatctgagtacaccgcaggccttcattaccaccgacatggatcaaaaccagattacggcgtttcacagcggcgcaatgatgcgttcgtacgaaaatcacgttcgtgatgtgccgggtgttaccttgggcctcgtaggtcctgatggacgcgagggcatgatccaaaatgccgaagaatttgctgctatgggcattccgttcatttttgacccaggtcaggcagtgcctctgttcaacggccccgaactgcgcgagtttatcgaacaggcggactatgtggtggtcaacgattacgaaagccgtcttcttcaagcccgtactggctggaacgagcaggacattgtttcacgcgtgcaggcgtatatcaccacgcaaggttcggctggagccgtggtacatacaccggagaagacctacgatattccggctgctaaaactcgtcgtgtcgttgatccaactggttgcggcgacgcgtttcgcgccggcctgatctatggtattcagcataattatgattggttgaccattggccgcatgggaaacttaatgggtgcgctgaaagtggaacaccctggcacccaaaatcagcgtttcgattttgccgaattcaacgaccagttcaaacaatattttggctacgcgctc

SEQ ID NO: 1448 - protein, 321 aa, synthetic construct
  REGION 1..321: note = variant of adenosine kinase from Xanthemonas campestris
MHHHHHHGGSGMSALICGSLAYDNIMVFPDQFKNHILPDRVHRLNVSFLVPDMRREFGGCAGNIAYNLHLLGGAPIVMATVGQDFGPYREHFETLGIDLSRVKIIMDLSTPQAFITTDMDQNQITAFHSGAMMRSYENHVRDVPGVTLGLVGPDGREGMIQNAEEFAAMGIPFIFDPGQAVPLFNGPELREFIEQADYVVVNDYESRLLQARTGWNEQDIVSRVQAYITTQGSAGAVVHTPEKTYDIPAAKTRRVVDPTGCGDAFRAGLIYGIQHNYDWLTIGRMGNLMGALKVEHPGTQNQRFDFAEFNDQFKQYFGYAL

SEQ ID NO: 1449 - DNA, 963 bp, synthetic construct
  misc_feature 1..963: note = variant of adenosine kinase from Xanthemonas campestris
  source 1..963: mol_type = other DNA
atgcatcatcaccatcaccatggggggtccggtatgagtgcactcatttgcggttctttagcgtatgataacatcatggtgtttccggaccagttcaagaaccatattctgcccgatcgtgttcaccgcctcaatgtcagctttcttgtaccggacatgcgtcgtgaatttggaggctgtgccggcaacattgcgtacaatctgcatctgttgggtggtgctccgatcgtaatggctacggtgggccaagatttcggtccgtatcgcgagcacttcgaaactctgggcattgacttatcccgcgtcaagatcatcgatgatctgagtacaccgcaggccttcattaccaccgacatggatcaaaaccagattacggcgtttcacagcggcgcaatgatgcgttcgtacgaaaatcacgttcgtgatgtgccgggtgttaccttgggcctcgtaggtcctgatggacgcgagggcatgatccaaaatgccgaagaatttgctgctatgggctgtccgttcatttttgacccaggtcaggcagtgcctctgttcaacggccccgaactgcgcgagtttatcgaacaggcggactatgtggtggtcaacgattacgaaagccgtcttcttcaagcccgtactggctggaacgagcaggacattgtttcacgcgtgcaggcgtatatcaccacgcaaggttcggctggagccgtggtacatacaccggagaagacctacgatattccggctgctaaaactcgtcgtgtcgttgatccaactggttgcggcgacgcgtttcgcgccggcctgatctatggtattcagcataattatgattggttgaccattggccgcatgggaaacttaatgggtgcgctgaaagtggaacaccctggcacccaaaatcagcgtttcgattttgccgaattcaacgaccagttcaaacaatattttggctacgcgctc

SEQ ID NO: 1450 - protein, 321 aa, synthetic construct
  REGION 1..321: note = variant of adenosine kinase from Xanthemonas campestris
MHHHHHHGGSGMSALICGSLAYDNIMVFPDQFKNHILPDRVHRLNVSFLVPDMRREFGGCAGNIAYNLHLLGGAPIVMATVGQDFGPYREHFETLGIDLSRVKIIDDLSTPQAFITTDMDQNQITAFHSGAMMRSYENHVRDVPGVTLGLVGPDGREGMIQNAEEFAAMGCPFIFDPGQAVPLFNGPELREFIEQADYVVVNDYESRLLQARTGWNEQDIVSRVQAYITTQGSAGAVVHTPEKTYDIPAAKTRRVVDPTGCGDAFRAGLIYGIQHNYDWLTIGRMGNLMGALKVEHPGTQNQRFDFAEFNDQFKQYFGYAL

SEQ ID NO: 1451 - DNA, 963 bp, synthetic construct
  misc_feature 1..963: note = variant of adenosine kinase from Xanthemonas campestris
  source 1..963: mol_type = other DNA
atgcatcatcaccatcaccatggggggtccggtatgagtgcactcatttgcggttctttagcgtatgataacatcatggtgtttccggaccagttcaagaaccatattctgcccgatcgtgttcaccgcctcaatgtcagctttcttgtaccggacatgcgtcgtgaatttggaggctgtgccggcaacattgcgtacaatctgcatctgttgggtggtgctccgatcgtaatggctacggtgggccaagatttcggtccgtatcgcgagcacttcgcgactctgggcattgacttatcccgcgtcaagatcatcgatgatctgagtacaccgcaggccttcattaccaccgacatggatcaaaaccagattacggcgtttcacagcggcgcaatgatgcgttcgtacgaaaatcacgttcgtgatgtgccgggtgttaccttgggcctcgtaggtcctgatggacgcgagggcatgatccaaaatgccgaagaatttgctgctatgggcattccgttcatttttgacccaggtcaggcagtgcctctgttcaacggccccgaactgcgcgagtttatcgaacaggcggactatgtggtggtcaacgattacgaaagccgtcttcttcaagcccgtactggctggaacgagcaggacattgtttcacgcgtgcaggcgtatatcaccacgcaaggttcggctggagccgtggtacatacaccggagaagacctacgatattccggctgctaaaactcgtcgtgtcgttgatccaactggttgcggcgacgcgtttcgcgccggcctgatctatggtattcagcataattatgattggttgaccattggccgcatgggaaacttaatgggtgcgctgaaagtggaacaccctggcacccaaaatcagcgtttcgattttgccgaattcaacgaccagttcaaacaatattttggctacgcgctc

SEQ ID NO: 1452 - protein, 321 aa, synthetic construct
  REGION 1..321: note = variant of adenosine kinase from Xanthemonas campestris
MHHHHHHGGSGMSALICGSLAYDNIMVFPDQFKNHILPDRVHRLNVSFLVPDMRREFGGCAGNIAYNLHLLGGAPIVMATVGQDFGPYREHFATLGIDLSRVKIIDDLSTPQAFITTDMDQNQITAFHSGAMMRSYENHVRDVPGVTLGLVGPDGREGMIQNAEEFAAMGIPFIFDPGQAVPLFNGPELREFIEQADYVVVNDYESRLLQARTGWNEQDIVSRVQAYITTQGSAGAVVHTPEKTYDIPAAKTRRVVDPTGCGDAFRAGLIYGIQHNYDWLTIGRMGNLMGALKVEHPGTQNQRFDFAEFNDQFKQYFGYAL

SEQ ID NO: 1453 - DNA, 963 bp, synthetic construct
  misc_feature 1..963: note = variant of adenosine kinase from Xanthemonas campestris
  source 1..963: mol_type = other DNA
atgcatcatcaccatcaccatggggggtccggtatgagtgcactcatttgcggttctttagcgtatgataacatcatggtgtttccggaccagttcaagaaccatattctgcccgatcgtgttcaccgcctcaatgtcagctttcttgtaccggacatgcgtcgtgaatttggaggctgtgccggcaacattgcgtacaatctgcatctgttgggtggtgctccgatcgtaatggctacggtgggccaagatttcggtccgtatcgcgagcacttcgaaactctgggcattgacttatcccgcgtcaagatcatcgatgatctgagtacaccgcaggccttcattaccaccgacatggatcaaaaccagattacggcgtttcacagcggcgcaatgatgcgttcgtacgaaaatcacgttcgtgatgtgccgggtgttaccttgggcctcgtaggtcctgatggacgcgagggcatgatccaaaatgccgaagaatttgctgctatgggcattccgttcatttttgacccaggtcaggcagtgcctctgttcaacggccccgaactgcgcgagtttatcgaacaggcggactatgtggtggtcaacgattacgaaagccgtcttcttcaagcccgtactggctggaacgagcaggacattgtttcacgcgtgcaggcgtatatcaccacgcaaggttcggctggagccgtggtacatacaccggagaagacctacgatattccggctgctaaaactcgtcgtgtcgttgatccaactggttgcggcgacgcgtttcgcgccggcctgatctatggtattcagcataattatgattggttgaccattggccgcatgggaaacttaatgggtgcgctgaaagtggaaaatcctggcacccaaaatcagcgtttcgattttgccgaattcaacgaccagttcaaacaatattttggctacgcgctc

SEQ ID NO: 1454 - protein, 321 aa, synthetic construct
  REGION 1..321: note = variant of adenosine kinase from Xanthemonas campestris
MHHHHHHGGSGMSALICGSLAYDNIMVFPDQFKNHILPDRVHRLNVSFLVPDMRREFGGCAGNIAYNLHLLGGAPIVMATVGQDFGPYREHFETLGIDLSRVKIIDDLSTPQAFITTDMDQNQITAFHSGAMMRSYENHVRDVPGVTLGLVGPDGREGMIQNAEEFAAMGIPFIFDPGQAVPLFNGPELREFIEQADYVVVNDYESRLLQARTGWNEQDIVSRVQAYITTQGSAGAVVHTPEKTYDIPAAKTRRVVDPTGCGDAFRAGLIYGIQHNYDWLTIGRMGNLMGALKVENPGTQNQRFDFAEFNDQFKQYFGYAL

SEQ ID NO: 1455 - DNA, 963 bp, synthetic construct
  misc_feature 1..963: note = variant of adenosine kinase from Xanthemonas campestris
  source 1..963: mol_type = other DNA
atgcatcatcaccatcaccatggggggtccggtatgagtgcactcatttgcggttctttagcgtatgataacatcatggtgtttccggaccagttcaagaaccatattctgcccgatcgtgttcaccgcctcaatgtcagctttcttgtaccggacatgcgtcgtgaatttggaggctgtgccggcaacattgcgtacaatctgcatctgttgggtggtgctccgatcgtaatggctacggtgggccaagatttcggtccgtatcgcgagcacttcgaaactctgggcattgacttagggcgcgtcaagatcatcgatgatctgagtacaccgcaggccttcattaccaccgacatggatcaaaaccagattacggcgtttcacagcggcgcaatgatgcgttcgtacgaaaatcacgttcgtgatgtgccgggtgttaccttgggcctcgtaggtcctgatggacgcgagggcatgatccaaaatgccgaagaatttgctgctatgggcattccgttcatttttgacccaggtcaggcagtgcctctgttcaacggccccgaactgcgcgagtttatcgaacaggcggactatgtggtggtcaacgattacgaaagccgtcttcttcaagcccgtactggctggaacgagcaggacattgtttcacgcgtgcaggcgtatatcaccacgcaaggttcggctggagccgtggtacatacaccggagaagacctacgatattccggctgctaaaactcgtcgtgtcgttgatccaactggttgcggcgacgcgtttcgcgccggcctgatctatggtattcagcataattatgattggttgaccattggccgcatgggaaacttaatgggtgcgctgaaagtggaacaccctggcacccaaaatcagcgtttcgattttgccgaattcaacgaccagttcaaacaatattttggctacgcgctc

SEQ ID NO: 1456 - protein, 321 aa, synthetic construct
  REGION 1..321: note = variant of adenosine kinase from Xanthemonas campestris
MHHHHHHGGSGMSALICGSLAYDNIMVFPDQFKNHILPDRVHRLNVSFLVPDMRREFGGCAGNIAYNLHLLGGAPIVMATVGQDFGPYREHFETLGIDLGRVKIIDDLSTPQAFITTDMDQNQITAFHSGAMMRSYENHVRDVPGVTLGLVGPDGREGMIQNAEEFAAMGIPFIFDPGQAVPLFNGPELREFIEQADYVVVNDYESRLLQARTGWNEQDIVSRVQAYITTQGSAGAVVHTPEKTYDIPAAKTRRVVDPTGCGDAFRAGLIYGIQHNYDWLTIGRMGNLMGALKVEHPGTQNQRFDFAEFNDQFKQYFGYAL

SEQ ID NO: 1457 - DNA, 963 bp, synthetic construct
  misc_feature 1..963: note = variant of adenosine kinase from Xanthemonas campestris
  source 1..963: mol_type = other DNA
atgcatcatcaccatcaccatggggggtccggtatgagtgcactcatttgcggttctttagcgtatgataacatcatggtgtttccggaccagttcaagaaccatattctgcccgatcgtgttcaccgcctcaatgtcagctttcttgtaccggacatgcgtcgtgaatttggaggctgtgccggcaacattgcgtacaatctgcatctgttgggtggtgctccgatcgtaatggctacggtgggccaagatttcggtccgtatcgcgagcacttcgaaactctgggcattgacttatcccgcgtcaagatcatcgatgatctgagtacaccgcaggccttcattaccaccgacatggatcaaaaccagattacggcgtttcacagcggcgcaatgatgcgttcgtacgaaaatcacgttcgtgatgtgccgggtgttaccttgggcctcgtaggtcctgatggacgcgagggcatgatccaaaatgccgaagaatttgctgctatgggcattccgttcatttttgacccaggtcaggcagtgcctctgttcaacggccccgaactgcgcgagtttatcgaacaggcggactatgtggtggtcaacgattacgaaagccgtcttcttcaagcccgtactggctggaacgagcaggacattgtttcacgcgtgcaggcgtatatcaccacgcaaggttcggctggagccgtggtacatacaccggagtatacctacgatattccggctgctaaaactcgtcgtgtcgttgatccaactggttgcggcgacgcgtttcgcgccggcctgatctatggtattcagcataattatgattggttgaccattggccgcatgggaaacttaatgggtgcgctgaaagtggaacaccctggcacccaaaatcagcgtttcgattttgccgaattcaacgaccagttcaaacaatattttggctacgcgctc

SEQ ID NO: 1458 - protein, 321 aa, synthetic construct
  REGION 1..321: note = variant of adenosine kinase from Xanthemonas campestris
MHHHHHHGGSGMSALICGSLAYDNIMVFPDQFKNHILPDRVHRLNVSFLVPDMRREFGGCAGNIAYNLHLLGGAPIVMATVGQDFGPYREHFETLGIDLSRVKIIDDLSTPQAFITTDMDQNQITAFHSGAMMRSYENHVRDVPGVTLGLVGPDGREGMIQNAEEFAAMGIPFIFDPGQAVPLFNGPELREFIEQADYVVVNDYESRLLQARTGWNEQDIVSRVQAYITTQGSAGAVVHTPEYTYDIPAAKTRRVVDPTGCGDAFRAGLIYGIQHNYDWLTIGRMGNLMGALKVEHPGTQNQRFDFAEFNDQFKQYFGYAL

SEQ ID NO: 1459 - DNA, 963 bp, synthetic construct
  misc_feature 1..963: note = variant of adenosine kinase from Xanthemonas campestris
  source 1..963: mol_type = other DNA
atgcatcatcaccatcaccatggggggtccggtatgagtgcactcatttgcggttctttagcgtatgataacatcatggtgtttccggaccagttcaagaaccatattctgcccgatcgtgttcaccgcctcaatgtcagctttcttgtaccggacatgcgtcgtgaatttggaggctgtgccggcaacattgcgtacaatctgcatctgttgggtggtgctccgatcgtaatggctacggtgggccaagatttcggtccgtatcgcgagcacttcgaaactctgggcattgacttatcccgcgtcaagatcatcgatgatctgagtacaccgcaggccttcattaccaccgacatggatcaaaaccagattacggcgtttcacagcggcgcaatgatgcgttcgtacgaaaatcacgttcgtgatgtgccgggtgttaccttgggcctcgtaggtcctgatggacgcgagggcatgatccaaaatgccgaagaatttgctgctatgggcatttcgttcatttttgacccaggtcaggcagtgcctctgttcaacggccccgaactgcgcgagtttatcgaacaggcggactatgtggtggtcaacgattacgaaagccgtcttcttcaagcccgtactggctggaacgagcaggacattgtttcacgcgtgcaggcgtatatcaccacgcaaggttcggctggagccgtggtacatacaccggagaagacctacgatattccggctgctaaaactcgtcgtgtcgttgatccaactggttgcggcgacgcgtttcgcgccggcctgatctatggtattcagcataattatgattggttgaccattggccgcatgggaaacttaatgggtgcgctgaaagtggaacaccctggcacccaaaatcagcgtttcgattttgccgaattcaacgaccagttcaaacaatattttggctacgcgctc

SEQ ID NO: 1460 - protein, 321 aa, synthetic construct
  REGION 1..321: note = variant of adenosine kinase from Xanthemonas campestris
MHHHHHHGGSGMSALICGSLAYDNIMVFPDQFKNHILPDRVHRLNVSFLVPDMRREFGGCAGNIAYNLHLLGGAPIVMATVGQDFGPYREHFETLGIDLSRVKIIDDLSTPQAFITTDMDQNQITAFHSGAMMRSYENHVRDVPGVTLGLVGPDGREGMIQNAEEFAAMGISFIFDPGQAVPLFNGPELREFIEQADYVVVNDYESRLLQARTGWNEQDIVSRVQAYITTQGSAGAVVHTPEKTYDIPAAKTRRVVDPTGCGDAFRAGLIYGIQHNYDWLTIGRMGNLMGALKVEHPGTQNQRFDFAEFNDQFKQYFGYAL

SEQ ID NO: 1461 - DNA, 963 bp, synthetic construct
  misc_feature 1..963: note = variant of adenosine kinase from Xanthemonas campestris
  source 1..963: mol_type = other DNA
atgcatcatcaccatcaccatggggggtccggtatgagtgcactcatttgcggttctttagcgtatgataacatcatggtgtttccggaccagttcaagaaccatattctgcccgatcgtgttcaccgcctcaatgtcagctttcttgtaccggacatgcgtcgtgaatttggaggctgtgccggcaacattgcgtacaatctgcatctgttgggtgcggctccgatcgtaatggctacggtgggccaagatttcggtccgtatcgcgagcacttcgaaactctgggcattgacttatcccgcgtcaagatcatcgatgatctgagtacaccgcaggccttcattaccaccgacatggatcaaaaccagattacggcgtttcacagcggcgcaatgatgcgttcgtacgaaaatcacgttcgtgatgtgccgggtgttaccttgggcctcgtaggtcctgatggacgcgagggcatgatccaaaatgccgaagaatttgctgctatgggcattccgttcatttttgacccaggtcaggcagtgcctctgttcaacggccccgaactgcgcgagtttatcgaacaggcggactatgtggtggtcaacgattacgaaagccgtcttcttcaagcccgtactggctggaacgagcaggacattgtttcacgcgtgcaggcgtatatcaccacgcaaggttcggctggagccgtggtacatacaccggagaagacctacgatattccggctgctaaaactcgtcgtgtcgttgatccaactggttgcggcgacgcgtttcgcgccggcctgatctatggtattcagcataattatgattggttgaccattggccgcatgggaaacttaatgggtgcgctgaaagtggaacaccctggcacccaaaatcagcgtttcgattttgccgaattcaacgaccagttcaaacaatattttggctacgcgctc

SEQ ID NO: 1462 - protein, 321 aa, synthetic construct
  REGION 1..321: note = variant of adenosine kinase from Xanthemonas campestris
MHHHHHHGGSGMSALICGSLAYDNIMVFPDQFKNHILPDRVHRLNVSFLVPDMRREFGGCAGNIAYNLHLLGAAPIVMATVGQDFGPYREHFETLGIDLSRVKIIDDLSTPQAFITTDMDQNQITAFHSGAMMRSYENHVRDVPGVTLGLVGPDGREGMIQNAEEFAAMGIPFIFDPGQAVPLFNGPELREFIEQADYVVVNDYESRLLQARTGWNEQDIVSRVQAYITTQGSAGAVVHTPEKTYDIPAAKTRRVVDPTGCGDAFRAGLIYGIQHNYDWLTIGRMGNLMGALKVEHPGTQNQRFDFAEFNDQFKQYFGYAL

SEQ ID NO: 1463 - DNA, 963 bp, synthetic construct
  misc_feature 1..963: note = variant of adenosine kinase from Xanthemonas campestris
  source 1..963: mol_type = other DNA
atgcatcatcaccatcaccatggggggtccggtatgagtgcactcatttgcggttctttagcgtatgataacatcatggtgtttccggaccagttcaagaaccatattctgcccgatcgtgttcaccgcctcaatgtcagctttctggtatttgacatgcgtcgtgaatttggaggctgtgccggcaacattgcgtacaatctgcatctgttgggtggtgctccgatcgtaatggctacggtgggccaagatttcggtccgtatcgcgaacacttcgaaactctgggcattgacttatcccgcgtcaagatcatcgatgatctgagtacaccgcaggccttcattaccaccgacatggatcaaaaccagattacggcgtttcacagcggcgcaatgatgcgttcgtacgaaaatcacgttcgtgatgtgccgggtgttaccttgggcctcgtaggtcctgatggacgcgagggcatgatccaaaatgccgaagaatttgctgctatgggcattccgttcatttttgacccaggtcaggcagtgcctctgttcaacggccccgaactgcgcgaatttatcgaacaggcggactatgtggtggtcaacgattacgaaagccgtcttcttcaagcccgtactggctggaacgagcaggacattgtttcacgcgtgcaggcgtatatcaccacgcaaggttcggctggagccgtggtacatacaccggagaagacctacgatattccggctgctaaaactcgtcgtgtcgttgatccaactggttgcggcgacgcgtttcgcgccggcctgatctatggtattcagcataattatgattggttgaccattggccgcatgggaaacttaatgggtgcgctgaaagtggaacaccctggcacccaaaatcagcgtttcgattttgccgaattcaacgaccagttcaaacaatattttggctacgcgctc

SEQ ID NO: 1464 - protein, 321 aa, synthetic construct
  REGION 1..321: note = variant of adenosine kinase from Xanthemonas campestris
MHHHHHHGGSGMSALICGSLAYDNIMVFPDQFKNHILPDRVHRLNVSFLVFDMRREFGGCAGNIAYNLHLLGGAPIVMATVGQDFGPYREHFETLGIDLSRVKIIDDLSTPQAFITTDMDQNQITAFHSGAMMRSYENHVRDVPGVTLGLVGPDGREGMIQNAEEFAAMGIPFIFDPGQAVPLFNGPELREFIEQADYVVVNDYESRLLQARTGWNEQDIVSRVQAYITTQGSAGAVVHTPEKTYDIPAAKTRRVVDPTGCGDAFRAGLIYGIQHNYDWLTIGRMGNLMGALKVEHPGTQNQRFDFAEFNDQFKQYFGYAL

SEQ ID NO: 1465 - DNA, 963 bp, synthetic construct
  misc_feature 1..963: note = variant of adenosine kinase from Xanthemonas campestris
  source 1..963: mol_type = other DNA
atgcatcatcaccatcaccatggggggtccggtatgagtgcactcatttgcggttctttagcgtatgataacatcatggtgtttccggaccagttcaagaaccatattctgcccgatcgtgttcaccgcctcaatgtcagctttctggtaccggacatgcgtcgtgaatttggaggctgtgccggcaacattgcgtacaatctgcatctgttgggtggtgctccgatcgtaatggctacggtgggccaagatttcggtccgtatcgcgagcacttcgaaactctgggcattgacttatcccgcgtcaagatcatcgatgatctgagtacaccgcaggccttcattaccaccgacatggatcaaaaccagattacggcgtttcacagcggcgcaatgatgcgttcgtacgaaaatcacgttcgtgatgtgccgggtgttaccttgggcctcgtaggtcctgatggacgcgagggcatgatccaaaatgccgaagaatttgctgctatgggcattccgttcatttttgacccaggtcaggcagtgcctctgttcaacggccccgaactgcgcgagtttatcgaacaggcggactatgtggtggtcaacgattacgaaagccgtcttcttcaagcccgtactggctggaacgagcaggacattgtttcacgcgtgcaggcgtatatcaccacgcaaggttcggctggagccgtggtacatacaccggagaagacctacgatattccggctgctaaaactcgtcgtgtcgttgatccaactggttgcggcgacgcgtttcgcgccggcctgatctggggtattcagcataattatgattggttgaccattggccgcatgggaaacttaatgggtgcgctgaaagtggaacaccctggcacccaaaatcagcgtttcgattttgccgaattcaacgaccagttcaaacaatattttggctacgcgctc

SEQ ID NO: 1466 - protein, 321 aa, synthetic construct
  REGION 1..321: note = variant of adenosine kinase from Xanthemonas campestris
MHHHHHHGGSGMSALICGSLAYDNIMVFPDQFKNHILPDRVHRLNVSFLVPDMRREFGGCAGNIAYNLHLLGGAPIVMATVGQDFGPYREHFETLGIDLSRVKIIDDLSTPQAFITTDMDQNQITAFHSGAMMRSYENHVRDVPGVTLGLVGPDGREGMIQNAEEFAAMGIPFIFDPGQAVPLFNGPELREFIEQADYVVVNDYESRLLQARTGWNEQDIVSRVQAYITTQGSAGAVVHTPEKTYDIPAAKTRRVVDPTGCGDAFRAGLIWGIQHNYDWLTIGRMGNLMGALKVEHPGTQNQRFDFAEFNDQFKQYFGYAL

SEQ ID NO: 1467 - DNA, 963 bp, synthetic construct
  misc_feature 1..963: note = variant of adenosine kinase from Xanthemonas campestris
  source 1..963: mol_type = other DNA
atgcatcatcaccatcaccatggggggtccggtatgagtgcactcatttgcggttctttagcgtatgataacatcatggtgtttccggaccagttcaagaaccatattctgcccgatcgtgttcaccgcctcaatgtcagctttcttgtaccggacatgcgtcgtgaatttggaggctgtgccggcaacattgcgtacaatctgcatctgttgggtggtgctccgatcgtaatggctacggtgggccaagatttcggtccgtatcgcagccacttcgaaactctgggcattgacttatcccgcgtcaagatcatcgatgatctgagtacaccgcaggccttcattaccaccgacatggatcaaaaccagattacggcgtttcacagcggcgcaatgatgcgttcgtacgaaaatcacgttcgtgatgtgccgggtgttaccttgggcctcgtaggtcctgatggacgcgagggcatgatccaaaatgccgaagaatttgctgctatgggcgttccgttcatttttgacccaggtcaggcagtgcctctgttcaacggccccgaactgcgctggtttatcgaacaggcggactatgtggtggtcaacgattacgaaagccgtcttcttcaagcccgtactggctggaacgagcaggacattgtttcacgcgtgcaggcgtatatcaccacgcaaggttcggctggagccgtggtacatacaccggagaagacctacgatattccggctgctaaaactcgtcgtgtcgttgatccaactggttgcggcgacgcgtttcgcgccggcctgatctatggtattcagcataattatgattggttgaccattggccgcatgggaaacttaatgggtgcgctgaaagtggaacaccctggcacccaaaatcagcgtttcgattttgccgaattcaacgaccagttcaaacaatattttggctacgcgctc

SEQ ID NO: 1468 - protein, 321 aa, synthetic construct
  REGION 1..321: note = variant of adenosine kinase from Xanthemonas campestris
MHHHHHHGGSGMSALICGSLAYDNIMVFPDQFKNHILPDRVHRLNVSFLVPDMRREFGGCAGNIAYNLHLLGGAPIVMATVGQDFGPYRSHFETLGIDLSRVKIIDDLSTPQAFITTDMDQNQITAFHSGAMMRSYENHVRDVPGVTLGLVGPDGREGMIQNAEEFAAMGVPFIFDPGQAVPLFNGPELRWFIEQADYVVVNDYESRLLQARTGWNEQDIVSRVQAYITTQGSAGAVVHTPEKTYDIPAAKTRRVVDPTGCGDAFRAGLIYGIQHNYDWLTIGRMGNLMGALKVEHPGTQNQRFDFAEFNDQFKQYFGYAL

SEQ ID NO: 1469 - DNA, 963 bp, synthetic construct
  misc_feature 1..963: note = variant of adenosine kinase from Xanthemonas campestris
  source 1..963: mol_type = other DNA
atgcatcatcaccatcaccatggggggtccggtatgagtgcactcatttgcggttctttagcgtatgataacatcatggtgtttccggaccagttcaagaaccatattctgcccgatcgtgttcaccgcctcaatgtcagctttctggtaccggacatgcgtcgtgaatttggaggctgtgccggcaacattgcgtacaatctgcatctgttgggtggtgctccgatcgtaatggctacggtgggccaagatttcggtccgtatcgcagccacttcgaaactctgggcattgacttatcccgcgtcaagatcatcgatgatctgagtacaccgcaggccttcattaccaccgacatggatcaaaaccagattacggcgtttcacagcggcgcaatgatgcgttcgtacgaaaatcacgttcgtgatgtgccgggtgttaccttgggcctcgtaggtcctgatggacgcgagggcatgatccaaaatgccgaagaatttgctgctatgggcattccgttcatttttgacccaggtcaggcagtgcctctgttcaacggccccgaactgcgcgagtttatcgaacaggcggactatgtggtggtcaacgattacgaaagccgtcttcttcaagcccgtactggctggaacgagcaggacattgtttcacgcgtgcaggcgtatatcaccacgcaaggttcggctggagccgtggtacatacaccggagaagacctacgatattccggctgctaaaactcgtcgtgtcgttgatccaactggttgcggcgacgcgtttcgcgccggcctgatctggggtattcagcataattatgattggttgaccattggccgcatgggaaacttaatgggtgcgctgaaagtggaacaccctggcacccaaaatcagcgtttcgattttgccgaattcaacgaccagttcaaacaatattttggctacgcgctc

SEQ ID NO: 1470 - protein, 321 aa, synthetic construct
  REGION 1..321: note = variant of adenosine kinase from Xanthemonas campestris
MHHHHHHGGSGMSALICGSLAYDNIMVFPDQFKNHILPDRVHRLNVSFLVPDMRREFGGCAGNIAYNLHLLGGAPIVMATVGQDFGPYRSHFETLGIDLSRVKIIDDLSTPQAFITTDMDQNQITAFHSGAMMRSYENHVRDVPGVTLGLVGPDGREGMIQNAEEFAAMGIPFIFDPGQAVPLFNGPELREFIEQADYVVVNDYESRLLQARTGWNEQDIVSRVQAYITTQGSAGAVVHTPEKTYDIPAAKTRRVVDPTGCGDAFRAGLIWGIQHNYDWLTIGRMGNLMGALKVEHPGTQNQRFDFAEFNDQFKQYFGYAL

SEQ ID NO: 1471 - DNA, 963 bp, synthetic construct
  misc_feature 1..963: note = variant of adenosine kinase from Xanthemonas campestris
  source 1..963: mol_type = other DNA
atgcatcatcaccatcaccatggggggtccggtatgagtgcactcatttgcggttctttagcgtatgataacatcatggtgtttccggaccagttcaagaaccatattctgcccgatcgtgttcaccgcctcaatgtcagctttcttgtaccggacatgcgtcgtgaatttggaggctgtgccggcaacattgcgtacaatctgcatctgttgggtggtgctccgatcgtaatggctacggtgggccaagatttcggtccgtatcgcagccacttcgaaactctgggcattgacttatcccgcgtcaagatcatcgatgatctgagtacaccgcaggccttcattaccaccgacatggatcaaaaccagattacggcgtttcacagcggcgcaatgatgcgttcgtacgaaaatcacgttcgtgatgtgccgggtgttaccttgggcctcgtaggtcctgatggacgcgagggcatgatccaaaatgccgaagaatttgctgctatgggcattccgttcatttttgacccaggtcaggcagtgcctctgttcaacggccccgaactgcgctggtttatcgaacaggcggactatgtggtggtcaacgattacgaaagccgtcttcttcaagcccgtactggctggaacgagcaggacattgtttcacgcgtgcaggcgtatatcaccacgcaaggttcggctggagccgtggtacatacaccggagaagacctacgatattccggctgctaaaactcgtcgtgtcgttgatccaactggttgcggcgacgcgtttcgcgccggcctgatctatggtattcagcataattatgattggttgaccattggccgcatgggaaacttaatgggtgcgctgaaagtggaacaccctggcacccaaaatcagcgtttcgattttgccgaattcaacgaccagttcaaacaatattttggctacgcgctc

SEQ ID NO: 1472 - protein, 321 aa, synthetic construct
  REGION 1..321: note = variant of adenosine kinase from Xanthemonas campestris
MHHHHHHGGSGMSALICGSLAYDNIMVFPDQFKNHILPDRVHRLNVSFLVPDMRREFGGCAGNIAYNLHLLGGAPIVMATVGQDFGPYRSHFETLGIDLSRVKIIDDLSTPQAFITTDMDQNQITAFHSGAMMRSYENHVRDVPGVTLGLVGPDGREGMIQNAEEFAAMGIPFIFDPGQAVPLFNGPELRWFIEQADYVVVNDYESRLLQARTGWNEQDIVSRVQAYITTQGSAGAVVHTPEKTYDIPAAKTRRVVDPTGCGDAFRAGLIYGIQHNYDWLTIGRMGNLMGALKVEHPGTQNQRFDFAEFNDQFKQYFGYAL

SEQ ID NO: 1473 - DNA, 963 bp, synthetic construct
  misc_feature 1..963: note = variant of adenosine kinase from Xanthemonas campestris
  source 1..963: mol_type = other DNA
atgcatcatcaccatcaccatggggggtccggtatgagtgcactcatttgcggttctttagcgtatgataacatcatggtgtttccggaccagttcaagaaccatattctgcccgatcgtgttcaccgcctcaatgtcagctttcttgtaccggacatgcgtcgtgaatttggaggctgtgccggcaacattgcgtacaatctgcatctgttgggtggtgctccgatcgtaatggctacggtgggccaagatttcggtccgtatcgcagccacttcgaaactctgggcattgacttatcccgcgtcaagatcatcgatgatctgagtacaccgcaggccttcattaccaccgacatggatcaaaaccagattacggcgtttcacagcggcgcaatgatgcgttcgtacgaaaatcacgttcgtgatgtgccgggtgttgccttgggcctcgtaggtcctgatggacgcgagggcatgatccaaaatgccgaagaatttgctgctatgggcgttccgttcatttttgacccaggtcaggcagtgcctctgttcaacggccccgaactgcgcgagtttatcgaacaggcggactatgtggtggtcaacgattacgaaagccgtcttcttcaagcccgtactggctggaacgagcaggacattgtttcacgcgtgcaggcgtatatcaccacgcaaggttcggctggagccgtggtacatacaccggagaagacctacgatattccggctgctaaaactcgtcgtgtcgttgatccaactggttgcggcgacgcgtttcgcgccggcctgatctggggtattcagcataattatgattggttgaccattggccgcatgggaaacttaatgggtgcgctgaaagtggaacaccctggcacccaaaatcagcgtttcgattttgccgaattcaacgaccagttcaaacaatattttggctacgcgctc

SEQ ID NO: 1474 - protein, 321 aa, synthetic construct
  REGION 1..321: note = variant of adenosine kinase from Xanthemonas campestris
MHHHHHHGGSGMSALICGSLAYDNIMVFPDQFKNHILPDRVHRLNVSFLVPDMRREFGGCAGNIAYNLHLLGGAPIVMATVGQDFGPYRSHFETLGIDLSRVKIIDDLSTPQAFITTDMDQNQITAFHSGAMMRSYENHVRDVPGVALGLVGPDGREGMIQNAEEFAAMGVPFIFDPGQAVPLFNGPELREFIEQADYVVVNDYESRLLQARTGWNEQDIVSRVQAYITTQGSAGAVVHTPEKTYDIPAAKTRRVVDPTGCGDAFRAGLIWGIQHNYDWLTIGRMGNLMGALKVEHPGTQNQRFDFAEFNDQFKQYFGYAL

SEQ ID NO: 1475 - DNA, 963 bp, synthetic construct
  misc_feature 1..963: note = variant of adenosine kinase from Xanthemonas campestris
  source 1..963: mol_type = other DNA
atgcatcatcaccatcaccatggggggtccggtatgagtgcactcatttgcggttctttagcgtatgataacatcatggtgtttccggaccagttcaagaaccatattctgcccgatcgtgttcaccgcctcaatgtcagctttcttgtaccggacatgcgtcgtgaatttggaggctgtgccggcaacattgcgtacaatctgcatctgttgggtggtgctccgatcgtaatggctacggtgggccaagatttcggtccgtatcgcgaacacttcgaaactctgggcattgacttatcccgcgtcaagatcatcgatgatctgagtacaccgcaggccttcattaccaccgacatggatcaaaaccagattacggcgtttcacagcggcgcaatgatgcgttcgtacgaaaatcacgttcgtgatgtgccgggtgttaccttgggcctcgtaggtcctgatggacgcgagggcatgatccaaaatgccgaagaatttgctgctatgggcattccgttcatttttgacccaggtcaggcagtgcctctgttcaacggccccgaactgcgctggtttatcgaacaggcggactatgtggtggtcaacgattacgaaagccgtcttcttcaagcccgtactggctggaacgagcaggacattgtttcacgcgtgcaggcgtatatcaccacgcaaggttcggctggagccgtggtacatacaccggagaagacctacgatattccggctgctaaaactcgtcgtgtcgttgatccaactggttgcggcgacgcgtttcgcgccggcctgatctatggtattcagcataattatgattggttgaccattggccgcatgggaaacttaatgggtgcgctgaaagtggaacaccctggcacccaaaatcagcgtttcgattttgccgaattcaacgaccagttcaaacaatattttggctacgcgctc

SEQ ID NO: 1476 - protein, 321 aa, synthetic construct
  REGION 1..321: note = variant of adenosine kinase from Xanthemonas campestris
MHHHHHHGGSGMSALICGSLAYDNIMVFPDQFKNHILPDRVHRLNVSFLVPDMRREFGGCAGNIAYNLHLLGGAPIVMATVGQDFGPYREHFETLGIDLSRVKIIDDLSTPQAFITTDMDQNQITAFHSGAMMRSYENHVRDVPGVTLGLVGPDGREGMIQNAEEFAAMGIPFIFDPGQAVPLFNGPELRWFIEQADYVVVNDYESRLLQARTGWNEQDIVSRVQAYITTQGSAGAVVHTPEKTYDIPAAKTRRVVDPTGCGDAFRAGLIYGIQHNYDWLTIGRMGNLMGALKVEHPGTQNQRFDFAEFNDQFKQYFGYAL

SEQ ID NO: 1477 - DNA, 963 bp, synthetic construct
  misc_feature 1..963: note = variant of adenosine kinase from Xanthemonas campestris
  source 1..963: mol_type = other DNA
atgcatcatcaccatcaccatggggggtccggtatgagtgcactcatttgcggttctttagcgtatgataacatcatggtgtttccggaccagttcaagaaccatattctgcccgatcgtgttcaccgcctcaatgtcagctttctggtatttgacatgcgtcgtgaatttggaggctgtgccggcaacattgcgtacaatctgcatctgttgggtggtgctccgatcgtaatggctacggtgggccaagatttcggtccgtatcgcagccacttcgaaactctgggcattgacttatcccgcgtcaagatcatcgatgatctgagtacaccgcaggccttcattaccaccgacatggatcaaaaccagattacggcgtttcacagcggcgcaatgatgcgttcgtacgaaaatcacgttcgtgatgtgccgggtgttaccttgggcctcgtaggtcctgatggacgcgagggcatgatccaaaatgccgaagaatttgctgctatgggcattccgttcatttttgacccaggtcaggcagtgcctctgttcaacggccccgaactgcgcgagtttatcgaacaggcggactatgtggtggtcaacgattacgaaagccgtcttcttcaagcccgtactggctggaacgagcaggacattgtttcacgcgtgcaggcgtatatcaccacgcaaggttcggctggagccgtggtacatacaccggagaagacctacgatattccggctgctaaaactcgtcgtgtcgttgatccaactggttgcggcgacgcgtttcgcgccggcctgatctatggtattcagcataattatgattggttgaccattggccgcatgggaaacttaatgggtgcgctgaaagtggaacaccctggcacccaaaatcagcgtttcgattttgccgaattcaacgaccagttcaaacaatattttggctacgcgctc

SEQ ID NO: 1478 - protein, 321 aa, synthetic construct
  REGION 1..321: note = variant of adenosine kinase from Xanthemonas campestris
MHHHHHHGGSGMSALICGSLAYDNIMVFPDQFKNHILPDRVHRLNVSFLVFDMRREFGGCAGNIAYNLHLLGGAPIVMATVGQDFGPYRSHFETLGIDLSRVKIIDDLSTPQAFITTDMDQNQITAFHSGAMMRSYENHVRDVPGVTLGLVGPDGREGMIQNAEEFAAMGIPFIFDPGQAVPLFNGPELREFIEQADYVVVNDYESRLLQARTGWNEQDIVSRVQAYITTQGSAGAVVHTPEKTYDIPAAKTRRVVDPTGCGDAFRAGLIYGIQHNYDWLTIGRMGNLMGALKVEHPGTQNQRFDFAEFNDQFKQYFGYAL

SEQ ID NO: 1479 - DNA, 963 bp, synthetic construct
  misc_feature 1..963: note = variant of adenosine kinase from Xanthemonas campestris
  source 1..963: mol_type = other DNA
atgcatcatcaccatcaccatggggggtccggtatgagtgcactcatttgcggttctttagcgtatgataacatcatggtgtttccggaccagttcaagaaccatattctgcccgatcgcgttcaccgcctcaatgtcagctttcttgtaccggacatgcgtcgtgaatttggaggctgtgccggcaacattgcgtacaatctgcatctgttgggtggtgctccgatcgtaatggctacggtgggccaagatttcggtccgtatcgcgagcacttcgaaactctgggcattgacttatcccgcgtcaagatcatcgatgatctgagtacaccgcaggccttcattaccaccgacatggatcaaaaccagattacggcgtttcacagcggcgcaatgatgcgttcgtacgaaaatcacgttcgtgatgtgccgggtgttaccttgggcctcgtaggtcctgatggacgcgagggcatgatccaaaatgccgaagaatttgctgctatgggcattccgttcatttttgacccaggtcaggcagtgcctctgttcaacggccatgaactgcgcgagtttatcgaacaggcggactatgtggtggtcaacgattacgaaagccgtcttcttcaatggcgtactggctggaacgagcaggacattgtgtcacgcgtgcaggcgtatatcaccacgcaaggttcggctggagccgtggtacatacaccggagaagacctacgatattccggctgctaaaactcgtcgtgtcgttgatccaactggttgcggcgacgcgtttcgcgccggcctgatctatggtattcagcataattatgattggttgaccattggccgcatgggaaacttaatgggtgcgctgaaagtggaacaccctggcacccaaaatcagcgtttcgattttgccgaattcaacgaccagttcaaacaatattttggctacgcgctc

SEQ ID NO: 1480 - protein, 321 aa, synthetic construct
  REGION 1..321: note = variant of adenosine kinase from Xanthemonas campestris
MHHHHHHGGSGMSALICGSLAYDNIMVFPDQFKNHILPDRVHRLNVSFLVPDMRREFGGCAGNIAYNLHLLGGAPIVMATVGQDFGPYREHFETLGIDLSRVKIIDDLSTPQAFITTDMDQNQITAFHSGAMMRSYENHVRDVPGVTLGLVGPDGREGMIQNAEEFAAMGIPFIFDPGQAVPLFNGHELREFIEQADYVVVNDYESRLLQWRTGWNEQDIVSRVQAYITTQGSAGAVVHTPEKTYDIPAAKTRRVVDPTGCGDAFRAGLIYGIQHNYDWLTIGRMGNLMGALKVEHPGTQNQRFDFAEFNDQFKQYFGYAL

SEQ ID NO: 1481 - DNA, 963 bp, synthetic construct
  misc_feature 1..963: note = variant of adenosine kinase from Xanthemonas campestris
  source 1..963: mol_type = other DNA
atgcatcatcaccatcaccatggggggtccggtatgagtgcactcatttgcggttctttagcgtatgataacatcatggtgtttccggaccagttcaagaaccatattctgcccgatcgtgttcaccgcctcaatgtcagctttcttgtaccggacatgcgtcgtgaatttggaggctgtgccggcaacattgcgtacaatctgcatctgttgggtggtgctccgatcgtaatggctacggtgggccaagatttcggtccgtatcgcgagcacttcgaaactctgggcattgacttatcccgcgtcaagatcatcgatgatctgagtacaccgcaggccttcattaccaccgacatggatcaaaaccagattacggcgtttcacagcggcgcaatgatgcgttcgtacgaaaatcacgttcgtgatgtgccgggtgttaccttgggcctcgtaggtcctgatggacgcgagggcatgatccaaaatgccgaagaatttgctgctatgggctgcccgttcatttttgacccaggtcaggcagtgcctctgttcaacggccccgaactgcgctggtttatcgaacaggcggactatgtggtggtcaacgattacgaaagccgtcttcttcaagcccgtactggctggaacgagcaggacattgtttcacgcgtgcaggcgtatatcaccacgcaaggttcggctggagccgtggtacatacaccggagaagacctacgatattccggctgctaaaactcgtcgtgtcgttgatccaactggttgcggcgacgcgtttcgcgccggcctgatctatggtattcagcataattatgattggttgaccattggccgcatgggaaacttaatgggtgcgctgaaagtggaacaccctggcacccaaaatcagcgtttcgattttgccgaattcaacgaccagttcaaacaatattttggctacgcgctc

SEQ ID NO: 1482 - protein, 321 aa, synthetic construct
  REGION 1..321: note = variant of adenosine kinase from Xanthemonas campestris
MHHHHHHGGSGMSALICGSLAYDNIMVFPDQFKNHILPDRVHRLNVSFLVPDMRREFGGCAGNIAYNLHLLGGAPIVMATVGQDFGPYREHFETLGIDLSRVKIIDDLSTPQAFITTDMDQNQITAFHSGAMMRSYENHVRDVPGVTLGLVGPDGREGMIQNAEEFAAMGCPFIFDPGQAVPLFNGPELRWFIEQADYVVVNDYESRLLQARTGWNEQDIVSRVQAYITTQGSAGAVVHTPEKTYDIPAAKTRRVVDPTGCGDAFRAGLIYGIQHNYDWLTIGRMGNLMGALKVEHPGTQNQRFDFAEFNDQFKQYFGYAL

SEQ ID NO: 1483 - DNA, 963 bp, synthetic construct
  misc_feature 1..963: note = variant of adenosine kinase from Xanthemonas campestris
  source 1..963: mol_type = other DNA
atgcatcatcaccatcaccatggggggtccggtatgagtgcactcatttgcggttctttagcgtatgataacatcatggtgtttccggaccagttcaagaaccatattctgcccgatcgcgttcaccgcctcaatgtcagctttcttgtgccggacatgcgtcgtgaatttggaggctgtgccggcaacattgcgtacaatctgcatctgttgggtggtgctccgatcgtaatggctacggtgggccaagatttcggtccgtatcgcgagcacttcgaaactctgggcattgacttatcccgcgtcaagatcatcgatgatctgagtacaccgcaggccttcattaccaccgacatggatcaaaaccagattacggcgtttcacagcggcgcaatgatgcgttcgtacgaaaatcacgttcgtgatgtgccgggtgttaccttgggcctcgtaggtcctgatggacgcgagggcatgatccaaaatgccgaagaatttgctgctatgatgattccgttcatttttgacccaggtcaggcagtgcctctgttcaacggccccgaactgcgcgagtttatcgaacaggcggactatgtggtggtcaacgattacgaaagccgtcttcttcaaaaacgtactggctggaacgagcaggacattgtgtcacgcgtgcaggcgtatatcaccacgcaaggttcggctggagccgtggtacatacaccggagaagacctacgatattccggctgctaaaactcgtcgtgtcgttgatccaactggttgcggcgacgcgtttcgcgccggcctgatctatggtattcagcataattatgattggttgaccattggccgcatgggaaacttaatgggtgcgctgaaagtggaacaccctggcacccaaaatcagcgtttcgattttgccgaattcaacgaccagttcaaacaatattttggctacgcgctc

SEQ ID NO: 1484 - protein, 321 aa, synthetic construct
  REGION 1..321: note = variant of adenosine kinase from Xanthemonas campestris
MHHHHHHGGSGMSALICGSLAYDNIMVFPDQFKNHILPDRVHRLNVSFLVPDMRREFGGCAGNIAYNLHLLGGAPIVMATVGQDFGPYREHFETLGIDLSRVKIIDDLSTPQAFITTDMDQNQITAFHSGAMMRSYENHVRDVPGVTLGLVGPDGREGMIQNAEEFAAMMIPFIFDPGQAVPLFNGPELREFIEQADYVVVNDYESRLLQKRTGWNEQDIVSRVQAYITTQGSAGAVVHTPEKTYDIPAAKTRRVVDPTGCGDAFRAGLIYGIQHNYDWLTIGRMGNLMGALKVEHPGTQNQRFDFAEFNDQFKQYFGYAL

SEQ ID NO: 1485 - DNA, 963 bp, synthetic construct
  misc_feature 1..963: note = variant of adenosine kinase from Xanthemonas campestris
  source 1..963: mol_type = other DNA
atgcatcatcaccatcaccatggggggtccggtatgagtgcactcatttgcggttctttagcgtatgataacatcatggtgtttccggaccagttcaagaaccatattctgcccgatcgtgttcaccgcctcaatgtcagctttatggtaggcgacatgcgtcgtgaatttggaggctgtgccggcaacattgcgtacaatctgcatctgttgggtggtgctccgatcgtaatggctacggtgggccaagatttcggtccgtatcgcgaacacttcgaaactctgggcattgacttatcccgcgtcaagatcatcgatgatctgagtacaccgcaggccttcattaccaccgacatggatcaaaaccagattacggcgtttcacagcggcgcaatgatgcgttcgtacgaaaatcacgttcgtgatgtgccgggtgttaccttgggcctcgtaggtcctgatggacgcgagggcatgatccaaaatgccgaagaatttgctgctatgggcattccgttcatttttgacccaggtcaggcagtgcctctgttcaacggccccgaactgcgcgaatttatcgaacaggcggactatgtggtggtcaacgattacgaaagccgtcttcttcaagcccgtactggctggaacgagcaggacattgtttcacgcgtgcaggcgtatatcaccacgcaaggttcggctggagccgtggtacatacaccggagaagacctacgatattccggctgctaaaactcgtcgtgtcgttgatccaactggttgcggcgacgcgtttcgcgccggcctgatctatggtattcagcataattatgattggttgaccattggccgcatgggaaacttaatgggtgcgctgaaagtggaacaccctggcacccaaaatcagcgtttcgattttgccgaattcaacgaccagttcaaacaatattttggctacgcgctc

SEQ ID NO: 1486 - protein, 321 aa, synthetic construct
  REGION 1..321: note = variant of adenosine kinase from Xanthemonas campestris
MHHHHHHGGSGMSALICGSLAYDNIMVFPDQFKNHILPDRVHRLNVSFMVGDMRREFGGCAGNIAYNLHLLGGAPIVMATVGQDFGPYREHFETLGIDLSRVKIIDDLSTPQAFITTDMDQNQITAFHSGAMMRSYENHVRDVPGVTLGLVGPDGREGMIQNAEEFAAMGIPFIFDPGQAVPLFNGPELREFIEQADYVVVNDYESRLLQARTGWNEQDIVSRVQAYITTQGSAGAVVHTPEKTYDIPAAKTRRVVDPTGCGDAFRAGLIYGIQHNYDWLTIGRMGNLMGALKVEHPGTQNQRFDFAEFNDQFKQYFGYAL

SEQ ID NO: 1487 - DNA, 963 bp, synthetic construct
  misc_feature 1..963: note = variant of adenosine kinase from Xanthemonas campestris
  source 1..963: mol_type = other DNA
atgcatcatcaccatcaccatggggggtccggtatgagtgcactcatttgcggttctttagcgtatgataacatcatggtgtttccggaccagttcaagaaccatattctgcccgatcgtgttcaccgcctcaatgtcagctttctggtaggcgacatgcgtcgtgaatttggaggctgtgccggcaacattgcgtacaatctgcatctgttgggtggtgctccgatcgtaatggctacggtgggccaagatttcggtccgtatcgcgaacacttcgaaactctgggcattgacttatcccgcgtcaagatcatcgatgatctgagtacaccgcaggccttcattaccaccgacatggatcaaaaccagattacggcgtttcacagcggcgcaatgatgcgttcgtacgaaaatcacgttcgtgatgtgccgggtgttaccttgggcctcgtaggtcctgatggacgcgagggcatgatccaaaatgccgaagaatttgctgctatgggctgcccgttcatttttgacccaggtcaggcagtgcctctgttcaacggccccgaactgcgctggtttatcgaacaggcggactatgtggtggtcaacgattacgaaagccgtcttcttcaagcccgtactggctggaacgagcaggacattgtttcacgcgtgcaggcgtatatcaccacgcaaggttcggctggagccgtggtacatacaccggagaagacctacgatattccggctgctaaaactcgtcgtgtcgttgatccaactggttgcggcgacgcgtttcgcgccggcctgatctggggtattcagcataattatgattggttgaccattggccgcatgggaaacttaatgggtgcgctgaaagtggaacaccctggcacccaaaatcagcgtttcgattttgccgaattcaacgaccagttcaaacaatattttggctacgcgctc

SEQ ID NO: 1488 - protein, 321 aa, synthetic construct
  REGION 1..321: note = variant of adenosine kinase from Xanthemonas campestris
MHHHHHHGGSGMSALICGSLAYDNIMVFPDQFKNHILPDRVHRLNVSFLVGDMRREFGGCAGNIAYNLHLLGGAPIVMATVGQDFGPYREHFETLGIDLSRVKIIDDLSTPQAFITTDMDQNQITAFHSGAMMRSYENHVRDVPGVTLGLVGPDGREGMIQNAEEFAAMGCPFIFDPGQAVPLFNGPELRWFIEQADYVVVNDYESRLLQARTGWNEQDIVSRVQAYITTQGSAGAVVHTPEKTYDIPAAKTRRVVDPTGCGDAFRAGLIWGIQHNYDWLTIGRMGNLMGALKVEHPGTQNQRFDFAEFNDQFKQYFGYAL

SEQ ID NO: 1489 - DNA, 963 bp, synthetic construct
  misc_feature 1..963: note = variant of adenosine kinase from Xanthemonas campestris
  source 1..963: mol_type = other DNA
atgcatcatcaccatcaccatggggggtccggtatgagtgcactcatttgcggttctttagcgtatgataacatcatggtgtttccggaccagttcaagaaccatattctgcccgatatggttcaccgcctcaatgtcagctttcttgtgccggatatgcgtcgtgaatttggaggctgtgccggcaacattgcgtacaatctgcatctgttgggtggtgctccgatcgtaatggctacggtgggccaagatttcggtccgtatcgcgagcacttcgaaactctgggcattgacttatcccgcgtcaagatcatcgatgatctgagtacaccgcaggccttcattaccaccgacatggatcaaaaccagattacggcgtttcacagcggcgcaatgatgcgttcgtacgaaaatcacgttcgtgatgtgccgggtgttaccttgggcctcgtaggtcctgatggacgcgagggcatgatccaaaatgccgaagaatttgctgctatgggcattccgttcatttttgacccaggtcaggcagtgcctctgttcaacggccctgaactgcgcgagtttatcgaacaggcggactatgtggtggtcaacgattacgaaagccgtcttcttcaaaaacgtactggctggaacgagcaggacattgtttcacgcgtgcaggcgtatatcaccacgcaaggttcggctggagccgtggtacatacaccggagaagacctacgatattccggctgctaaaactcgtcgtgtcgttgatccaactggttgcggcgacgcgtttcgcgccggcctgatctatggtattcagcataattatgattggttgaccattggccgcatgggaaacttaatgggtgcgctgaaagtggaacaccctggcacccaaaatcagcgtttcgattttgccgaattcaacgaccagttcaaacaatattttggctacgcgctc

SEQ ID NO: 1490 - protein, 321 aa, synthetic construct
  REGION 1..321: note = variant of adenosine kinase from Xanthemonas campestris
MHHHHHHGGSGMSALICGSLAYDNIMVFPDQFKNHILPDMVHRLNVSFLVPDMRREFGGCAGNIAYNLHLLGGAPIVMATVGQDFGPYREHFETLGIDLSRVKIIDDLSTPQAFITTDMDQNQITAFHSGAMMRSYENHVRDVPGVTLGLVGPDGREGMIQNAEEFAAMGIPFIFDPGQAVPLFNGPELREFIEQADYVVVNDYESRLLQKRTGWNEQDIVSRVQAYITTQGSAGAVVHTPEKTYDIPAAKTRRVVDPTGCGDAFRAGLIYGIQHNYDWLTIGRMGNLMGALKVEHPGTQNQRFDFAEFNDQFKQYFGYAL

SEQ ID NO: 1491 - DNA, 963 bp, synthetic construct
  misc_feature 1..963: note = variant of adenosine kinase from Xanthemonas campestris
  source 1..963: mol_type = other DNA
atgcatcatcaccatcaccatggggggtccggtatgagtgcactcatttgcggttctttagcgtatgataacatcatggtgtttccggaccagttcaagaaccatattctgcccgatcgcgttcaccgcctcaatgtcagctttcttgtaccggacatgcgtcgtgaatttggaggctgtgccggcaacattgcgtacaatctgcatctgttgggtggtgctccgatcgtaatggctacggtgggccaagatttcggtccgtatcgcgagcacttcgaaactctgggcattgacttatcccgcgtcaagatcatcaccgatctgagtacaccgcaggccttcattaccaccgacatggatcaaaaccagattacggcgtttcacagcggcgcaatgatgcgttcgtacgaaaatcacgttcgtgatgtgccgggtgttaccttgggcctcgtaggtcctgatggacgcgagggcatgatccaaaatgccgaagaatttgctgctatgggcattccgttcatttttgacccaggtcaggcagtgcctctgttcaacggccatgaactgcgcgagtttatcgaacaggcggactatgtggtggtcaacgattacgaaagccgtcttcttcaaaaacgtactggctggaacgagcaggacattgtgtcacgcgtgcaggcgtatatcaccacgcaaggttcggctggagccgtggtacatacaccggagaagacctacgatattccggctgctaaaactcgtcgtgtcgttgatccaactggttgcggcgacgcgtttcgcgccggcctgatctatggtattcagcataattatgattggttgaccattggccgcatgggaaacttaatgggtgcgctgaaagtggaacaccctggcacccaaaatcagcgtttcgattttgccgaattcaacgaccagttcaaacaatattttggctacgcgctc

SEQ ID NO: 1492 - protein, 321 aa, synthetic construct
  REGION 1..321: note = variant of adenosine kinase from Xanthemonas campestris
MHHHHHHGGSGMSALICGSLAYDNIMVFPDQFKNHILPDRVHRLNVSFLVPDMRREFGGCAGNIAYNLHLLGGAPIVMATVGQDFGPYREHFETLGIDLSRVKIITDLSTPQAFITTDMDQNQITAFHSGAMMRSYENHVRDVPGVTLGLVGPDGREGMIQNAEEFAAMGIPFIFDPGQAVPLFNGHELREFIEQADYVVVNDYESRLLQKRTGWNEQDIVSRVQAYITTQGSAGAVVHTPEKTYDIPAAKTRRVVDPTGCGDAFRAGLIYGIQHNYDWLTIGRMGNLMGALKVEHPGTQNQRFDFAEFNDQFKQYFGYAL

SEQ ID NO: 1493 - DNA, 963 bp, synthetic construct
  misc_feature 1..963: note = variant of adenosine kinase from Xanthemonas campestris
  source 1..963: mol_type = other DNA
atgcatcatcaccatcaccatggggggtccggtatgagtgcactcatttgcggttctttagcgtatgataacatcatggtgtttccggaccagttcaagaaccatattctgcccgatcgtgttcaccgcctcaatgtcagctttcttgtaccggacatgcgtcgtgaatttggaggctgtgccggcaacattgcgtacaatctgcatctgttgggtggtgctccgatcgtaatggctacggtgggccaagatttcggtccgtatcgcgagcacttcgaaactctgggcattgacttatcccgcgtcaagatcatcgatgatcttagtacaccgcaggccttcattaccaccgacatggatcaaaaccagattacggcgtttcacagcggcgcaatgatgcgttcgtacgaaaatcacgttcgtgatgtgccgggtgttaccttgggcctcgtaggtcctgatggacgcgagggcatgatccaaaatgccgaagaatttgctgctatgggcattccgttcatttttgacccaggtcaggcagtgcctctgttcaacggccctgaactgcgcgagtttatcgaacaggcggactatgtggtggtcaacgattacgaaagccgtcttcttcaatggcgtactggctggaacgagcaggacattgcgtcacgcgtgcaggcgtatatcaccacgcaaggttcggctggagccgtggtacatacaccggagaagacctacgatattccggctgctaaaactcgtcgtgtcgttgatccaactggttgcggcgacgcgtttcgcgccggcctgatctatggtattcagcataattatgattggttgaccattggccgcatgggaaacttaatgggtgcgctgaaagtggaacaccctggcacccaaaatcagcgtttcgattttgccgaattcaacgaccagttcaaacaatattttggctacgcgctc

SEQ ID NO: 1494 - protein, 321 aa, synthetic construct
  REGION 1..321: note = variant of adenosine kinase from Xanthemonas campestris
MHHHHHHGGSGMSALICGSLAYDNIMVFPDQFKNHILPDRVHRLNVSFLVPDMRREFGGCAGNIAYNLHLLGGAPIVMATVGQDFGPYREHFETLGIDLSRVKIIDDLSTPQAFITTDMDQNQITAFHSGAMMRSYENHVRDVPGVTLGLVGPDGREGMIQNAEEFAAMGIPFIFDPGQAVPLFNGPELREFIEQADYVVVNDYESRLLQWRTGWNEQDIASRVQAYITTQGSAGAVVHTPEKTYDIPAAKTRRVVDPTGCGDAFRAGLIYGIQHNYDWLTIGRMGNLMGALKVEHPGTQNQRFDFAEFNDQFKQYFGYAL

SEQ ID NO: 1495 - DNA, 963 bp, synthetic construct
  misc_feature 1..963: note = variant of adenosine kinase from Xanthemonas campestris
  source 1..963: mol_type = other DNA
atgcatcatcaccatcaccatggggggtccggtatgagtgcactcatttgcggttctttagcgtatgataacatcatggtgtttccggaccagttcaagaaccatattctgcccgatatggttcaccgcctcaatgtcagctttcttgtgccggatatgcgtcgtgaatttggaggctgtgccggcaacattgcgtacaatctgcatctgttgggtggtgctccgatcgtaatggctacggtgggccaagatttcggtccgtatcgcgagcacttcgaaactctgggcattgacttatcccgcgtcaagatcatcgatgatctgagtacaccgcaggccttcattaccaccgacatggatcaaaaccagattacggcgtttcacagcggcgcaatgatgcgttcgtacgaaaatcacgttcgtgatgtgccgggtgttaccttgggcctcgtaggtcctgatggacgcgagggcatgatccaaaatgccgaagaatttgctgctatgatgattccgttcatttttgacccaggtcaggcagtgcctctgttcaacggccccgaactgcgcgagtttatcgaacaggcggactatgtggtggtcaacgattacgaaagccgtcttcttcaaaaacgtactggctggaacgagcaggacattgtgtcacgcgtgcaggcgtatatcaccacgcaaggttcggctggagccgtggtacatacaccggagaagacctacgatattccggctgctaaaactcgtcgtgtcgttgatccaactggttgcggcgacgcgtttcgcgccggcctgatctatggtattcagcataattatgattggttgaccattggccgcatgggaaacttaatgggtgcgctgaaagtggaacaccctggcacccaaaatcagcgtttcgattttgccgaattcaacgaccagttcaaacaatattttggctacgcgctc

SEQ ID NO: 1496 - protein, 321 aa, synthetic construct
  REGION 1..321: note = variant of adenosine kinase from Xanthemonas campestris
MHHHHHHGGSGMSALICGSLAYDNIMVFPDQFKNHILPDMVHRLNVSFLVPDMRREFGGCAGNIAYNLHLLGGAPIVMATVGQDFGPYREHFETLGIDLSRVKIIDDLSTPQAFITTDMDQNQITAFHSGAMMRSYENHVRDVPGVTLGLVGPDGREGMIQNAEEFAAMMIPFIFDPGQAVPLFNGPELREFIEQADYVVVNDYESRLLQKRTGWNEQDIVSRVQAYITTQGSAGAVVHTPEKTYDIPAAKTRRVVDPTGCGDAFRAGLIYGIQHNYDWLTIGRMGNLMGALKVEHPGTQNQRFDFAEFNDQFKQYFGYAL

SEQ ID NO: 1497 - DNA, 963 bp, synthetic construct
  misc_feature 1..963: note = variant of adenosine kinase from Xanthemonas campestris
  source 1..963: mol_type = other DNA
atgcatcatcaccatcaccatggggggtccggtatgagtgcactcatttgcggttctttagcgtatgataacatcatggtgtttccggaccagttcaagaaccatattctgcccgatcgcgttcaccgcctcaatgtcagctttcttgtaccggacatgcgtcgtgaatttggaggctgtgccggcaacattgcgtacaatctgcatctgttgggtggtgctccgatcgtaatggctacggtgggccaagatttcggtccgtatcgcgagcacttcgaaactctgggcattgacttatcccgcgtcaagatcatcgatgatctgagtacaccgcaggccttcattaccaccgacatggatcaaaaccagattacggcgtttcacagcggcgcaatgatgcgttcgtacgaaaatcacgttcgtgatgtgccgggtgttaccttgggcctcgtaggtcctgatggacgcgagggcatgatccaaaatgccgaagaatttgctgctatgggcattccgttcatttttgacccaggtcaggcagtgcctctgttcaacggccccgaactgcgcgagtttatcgaacaggcggactatgtggtggtcaacgattacgaaagccgtcttcttcaatggcgtactggctggaacgagcaggacattgtttcacgcgtgcaggcgtatatcaccacgcaaggttcggctggagccgtggtacatacaccggagaagacctacgatattccggctgctaaaactcgtcgtgtcgttgatccaactggttgcggcgacgcgtttcgcgccggcctgatctatggtattcagcataattatgattggttgaccattggccgcatgggaaacttaatgggtgcgctgaaagtggaacaccctggcacccaaaatcagcgtttcgattttgccgaattcaacgaccagttcaaacaatattttggctacgcgctc

SEQ ID NO: 1498 - protein, 321 aa, synthetic construct
  REGION 1..321: note = variant of adenosine kinase from Xanthemonas campestris
MHHHHHHGGSGMSALICGSLAYDNIMVFPDQFKNHILPDRVHRLNVSFLVPDMRREFGGCAGNIAYNLHLLGGAPIVMATVGQDFGPYREHFETLGIDLSRVKIIDDLSTPQAFITTDMDQNQITAFHSGAMMRSYENHVRDVPGVTLGLVGPDGREGMIQNAEEFAAMGIPFIFDPGQAVPLFNGPELREFIEQADYVVVNDYESRLLQWRTGWNEQDIVSRVQAYITTQGSAGAVVHTPEKTYDIPAAKTRRVVDPTGCGDAFRAGLIYGIQHNYDWLTIGRMGNLMGALKVEHPGTQNQRFDFAEFNDQFKQYFGYAL

SEQ ID NO: 1499 - DNA, 963 bp, synthetic construct
  misc_feature 1..963: note = variant of adenosine kinase from Xanthemonas campestris
  source 1..963: mol_type = other DNA
atgcatcatcaccatcaccatggggggtccggtatgagtgcactcatttgcggttctttagcgtatgataacatcatggtgtttccggaccagttcaagaaccatattctgcccgatcgtgttcaccgcctcaatgtcagctttatggtaggcgacatgcgtcgtgaatttggaggctgtgccggcaacattgcgtacaatctgcatctgttgggtggtgctccgatcgtaatggctacggtgggccaagatttcggtccgtatcgcagccacttcgaaactctgggcattgacttatcccgcgtcaagatcatcgatgatctgagtacaccgcaggccttcattaccaccgacatggatcaaaaccagattacggcgtttcacagcggcgcaatgatgcgttcgtacgaaaatcacgttcgtgatgtgccgggtgttgccttgggcctcgtaggtcctgatggacgcgagggcatgatccaaaatgccgaagaatttgctgctatgggcgttccgttcatttttgacccaggtcaggcagtgcctctgttcaacggccccgaactgcgcgaatttatcgaacaggcggactatgtggtggtcaacgattacgaaagccgtcttcttcaagcccgtactggctggaacgagcaggacattgtttcacgcgtgcaggcgtatatcaccacgcaaggttcggctggagccgtggtacatacaccggagaagacctacgatattccggctgctaaaactcgtcgtgtcgttgatccaactggttgcggcgacgcgtttcgcgccggcctgatctatggtattcagcataattatgattggttgaccattggccgcatgggaaacttaatgggtgcgctgaaagtggaacaccctggcacccaaaatcagcgtttcgattttgccgaattcaacgaccagttcaaacaatattttggctacgcgctc

SEQ ID NO: 1500 - protein, 321 aa, synthetic construct
  REGION 1..321: note = variant of adenosine kinase from Xanthemonas campestris
MHHHHHHGGSGMSALICGSLAYDNIMVFPDQFKNHILPDRVHRLNVSFMVGDMRREFGGCAGNIAYNLHLLGGAPIVMATVGQDFGPYRSHFETLGIDLSRVKIIDDLSTPQAFITTDMDQNQITAFHSGAMMRSYENHVRDVPGVALGLVGPDGREGMIQNAEEFAAMGVPFIFDPGQAVPLFNGPELREFIEQADYVVVNDYESRLLQARTGWNEQDIVSRVQAYITTQGSAGAVVHTPEKTYDIPAAKTRRVVDPTGCGDAFRAGLIYGIQHNYDWLTIGRMGNLMGALKVEHPGTQNQRFDFAEFNDQFKQYFGYAL

SEQ ID NO: 1501 - DNA, 963 bp, synthetic construct
  misc_feature 1..963: note = variant of adenosine kinase from Xanthemonas campestris
  source 1..963: mol_type = other DNA
atgcatcatcaccatcaccatggggggtccggtatgagtgcactcatttgcggttctttagcgtatgataacatcatggtgtttccggaccagttcaagaaccatattctgcccgatcgtgttcaccgcctcaatgtcagctttctggtaggcgacatgcgtcgtgaatttggaggctgtgccggcaacattgcgtacaatctgcatctgttgggtggtgctccgatcgtaatggctacggtgggccaagatttcggtccgtatcgcagccacttcgaaactctgggcattgacttatcccgcgtcaagatcatcgatgatctgagtacaccgcaggccttcattaccaccgacatggatcaaaaccagattacggcgtttcacagcggcgcaatgatgcgttcgtacgaaaatcacgttcgtgatgtgccgggtgttaccttgggcctcgtaggtcctgatggacgcgagggcatgatccaaaatgccgaagaatttgctgctatgggcgttccgttcatttttgacccaggtcaggcagtgcctctgttcaacggccccgaactgcgcgaatttatcgaacaggcggactatgtggtggtcaacgattacgaaagccgtcttcttcaagcccgtactggctggaacgagcaggacattgtttcacgcgtgcaggcgtatatcaccacgcaaggttcggctggagccgtggtacatacaccggagaagacctacgatattccggctgctaaaactcgtcgtgtcgttgatccaactggttgcggcgacgcgtttcgcgccggcctgatctatggtattcagcataattatgattggttgaccattggccgcatgggaaacttaatgggtgcgctgaaagtggaacaccctggcacccaaaatcagcgtttcgattttgccgaattcaacgaccagttcaaacaatattttggctacgcgctc

SEQ ID NO: 1502 - protein, 321 aa, synthetic construct
  REGION 1..321: note = variant of adenosine kinase from Xanthemonas campestris
MHHHHHHGGSGMSALICGSLAYDNIMVFPDQFKNHILPDRVHRLNVSFLVGDMRREFGGCAGNIAYNLHLLGGAPIVMATVGQDFGPYRSHFETLGIDLSRVKIIDDLSTPQAFITTDMDQNQITAFHSGAMMRSYENHVRDVPGVTLGLVGPDGREGMIQNAEEFAAMGVPFIFDPGQAVPLFNGPELREFIEQADYVVVNDYESRLLQARTGWNEQDIVSRVQAYITTQGSAGAVVHTPEKTYDIPAAKTRRVVDPTGCGDAFRAGLIYGIQHNYDWLTIGRMGNLMGALKVEHPGTQNQRFDFAEFNDQFKQYFGYAL

SEQ ID NO: 1503 - DNA, 963 bp, synthetic construct
  misc_feature 1..963: note = variant of adenosine kinase from Xanthemonas campestris
  source 1..963: mol_type = other DNA
atgcatcatcaccatcaccatggggggtccggtatgagtgcactcatttgcggttctttagcgtatgataacatcatggtgtttccggaccagttcaagaaccatattctgcccgatcgtgttcaccgcctcaatgtcagctttctggtaggcgacatgcgtcgtgaatttggaggctgtgccggcaacattgcgtacaatctgcatctgttgggtggtgctccgatcgtaatggctacggtgggccaagatttcggtccgtatcgcgaacacttcgaaactctgggcattgacttatcccgcgtcaagatcatcgatgatctgagtacaccgcaggccttcattaccaccgacatggatcaaaaccagattacggcgtttcacagcggcgcaatgatgcgttcgtacgaaaatcacgttcgtgatgtgccgggtgttaccttgggcctcgtaggtcctgatggacgcgagggcatgatccaaaatgccgaagaatttgctgctatgggcgttccgttcatttttgacccaggtcaggcagtgcctctgttcaacggccccgaactgcgcgaatttatcgaacaggcggactatgtggtggtcaacgattacgaaagccgtcttcttcaagcccgtactggctggaacgagcaggacattgtttcacgcgtgcaggcgtatatcaccacgcaaggttcggctggagccgtggtacatacaccggagaagacctacgatattccggctgctaaaactcgtcgtgtcgttgatccaactggttgcggcgacgcgtttcgcgccggcctgatctatggtattcagcataattatgattggttgaccattggccgcatgggaaacttaatgggtgcgctgaaagtggaacaccctggcacccaaaatcagcgtttcgattttgccgaattcaacgaccagttcaaacaatattttggctacgcgctc

SEQ ID NO: 1504 - protein, 321 aa, synthetic construct
  REGION 1..321: note = variant of adenosine kinase from Xanthemonas campestris
MHHHHHHGGSGMSALICGSLAYDNIMVFPDQFKNHILPDRVHRLNVSFLVGDMRREFGGCAGNIAYNLHLLGGAPIVMATVGQDFGPYREHFETLGIDLSRVKIIDDLSTPQAFITTDMDQNQITAFHSGAMMRSYENHVRDVPGVTLGLVGPDGREGMIQNAEEFAAMGVPFIFDPGQAVPLFNGPELREFIEQADYVVVNDYESRLLQARTGWNEQDIVSRVQAYITTQGSAGAVVHTPEKTYDIPAAKTRRVVDPTGCGDAFRAGLIYGIQHNYDWLTIGRMGNLMGALKVEHPGTQNQRFDFAEFNDQFKQYFGYAL

SEQ ID NO: 1505 - DNA, 963 bp, synthetic construct
  misc_feature 1..963: note = variant of adenosine kinase from Xanthemonas campestris
  source 1..963: mol_type = other DNA
atgcatcatcaccatcaccatggggggtccggtatgagtgcactcatttgcggttctttagcgtatgataacatcatggtgtttccggaccagttcaagaaccatattctgcccgatcgtgttcaccgcctcaatgtcagctttatggtatttgacatgcgtcgtgaatttggaggctgtgccggcaacattgcgtacaatctgcatctgttgggtggtgctccgatcgtaatggctacggtgggccaagatttcggtccgtatcgcgaacacttcgaaactctgggcattgacttatcccgcgtcaagatcatcgatgatctgagtacaccgcaggccttcattaccaccgacatggatcaaaaccagattacggcgtttcacagcggcgcaatgatgcgttcgtacgaaaatcacgttcgtgatgtgccgggtgttaccttgggcctcgtaggtcctgatggacgcgagggcatgatccaaaatgccgaagaatttgctgctatgggcattccgttcatttttgacccaggtcaggcagtgcctctgttcaacggccccgaactgcgctggtttatcgaacaggcggactatgtggtggtcaacgattacgaaagccgtcttcttcaagcccgtactggctggaacgagcaggacattgtttcacgcgtgcaggcgtatatcaccacgcaaggttcggctggagccgtggtacatacaccggagaagacctacgatattccggctgctaaaactcgtcgtgtcgttgatccaactggttgcggcgacgcgtttcgcgccggcctgatctatggtattcagcataattatgattggttgaccattggccgcatgggaaacttaatgggtgcgctgaaagtggaacaccctggcacccaaaatcagcgtttcgattttgccgaattcaacgaccagttcaaacaatattttggctacgcgctc

SEQ ID NO: 1506 - protein, 321 aa, synthetic construct
  REGION 1..321: note = variant of adenosine kinase from Xanthemonas campestris
MHHHHHHGGSGMSALICGSLAYDNIMVFPDQFKNHILPDRVHRLNVSFMVFDMRREFGGCAGNIAYNLHLLGGAPIVMATVGQDFGPYREHFETLGIDLSRVKIIDDLSTPQAFITTDMDQNQITAFHSGAMMRSYENHVRDVPGVTLGLVGPDGREGMIQNAEEFAAMGIPFIFDPGQAVPLFNGPELRWFIEQADYVVVNDYESRLLQARTGWNEQDIVSRVQAYITTQGSAGAVVHTPEKTYDIPAAKTRRVVDPTGCGDAFRAGLIYGIQHNYDWLTIGRMGNLMGALKVEHPGTQNQRFDFAEFNDQFKQYFGYAL

SEQ ID NO: 1507 - DNA, 963 bp, synthetic construct
  misc_feature 1..963: note = variant of adenosine kinase from Xanthemonas campestris
  source 1..963: mol_type = other DNA
atgcatcatcaccatcaccatggggggtccggtatgagtgcactcatttgcggttctttagcgtatgataacatcatggtgtttccggaccagttcaagaaccatattctgcccgatcgtgttcaccgcctcaatgtcagctttatggtaggcgacatgcgtcgtgaatttggaggctgtgccggcaacattgcgtacaatctgcatctgttgggtggtgctccgatcgtaatggctacggtgggccaagatttcggtccgtatcgcagccacttcgaaactctgggcattgacttatcccgcgtcaagatcatcgatgatctgagtacaccgcaggccttcattaccaccgacatggatcaaaaccagattacggcgtttcacagcggcgcaatgatgcgttcgtacgaaaatcacgttcgtgatgtgccgggtgttgccttgggcctcgtaggtcctgatggacgcgagggcatgatccaaaatgccgaagaatttgctgctatgggcattccgttcatttttgacccaggtcaggcagtgcctctgttcaacggccccgaactgcgcgagtttatcgaacaggcggactatgtggtggtcaacgattacgaaagccgtcttcttcaagcccgtactggctggaacgagcaggacattgtttcacgcgtgcaggcgtatatcaccacgcaaggttcggctggagccgtggtacatacaccggagaagacctacgatattccggctgctaaaactcgtcgtgtcgttgatccaactggttgcggcgacgcgtttcgcgccggcctgatctatggtattcagcataattatgattggttgaccattggccgcatgggaaacttaatgggtgcgctgaaagtggaacaccctggcacccaaaatcagcgtttcgattttgccgaattcaacgaccagttcaaacaatattttggctacgcgctc

SEQ ID NO: 1508 - protein, 321 aa, synthetic construct
  REGION 1..321: note = variant of adenosine kinase from Xanthemonas campestris
MHHHHHHGGSGMSALICGSLAYDNIMVFPDQFKNHILPDRVHRLNVSFMVGDMRREFGGCAGNIAYNLHLLGGAPIVMATVGQDFGPYRSHFETLGIDLSRVKIIDDLSTPQAFITTDMDQNQITAFHSGAMMRSYENHVRDVPGVALGLVGPDGREGMIQNAEEFAAMGIPFIFDPGQAVPLFNGPELREFIEQADYVVVNDYESRLLQARTGWNEQDIVSRVQAYITTQGSAGAVVHTPEKTYDIPAAKTRRVVDPTGCGDAFRAGLIYGIQHNYDWLTIGRMGNLMGALKVEHPGTQNQRFDFAEFNDQFKQYFGYAL

SEQ ID NO: 1509 - DNA, 963 bp, synthetic construct
  misc_feature 1..963: note = variant of adenosine kinase from Xanthemonas campestris
  source 1..963: mol_type = other DNA
atgcatcatcaccatcaccatggggggtccggtatgagtgcactcatttgcggttctttagcgtatgataacatcatggtgtttccggaccagttcaagaaccatattctgcccgatcgtgttcaccgcctcaatgtcagctttctggtaggcgacatgcgtcgtgaatttggaggctgtgccggcaacattgcgtacaatctgcatctgttgggtggtgctccgatcgtaatggctacggtgggccaagatttcggtccgtatcgcgagcacttcgaaactctgggcattgacttatcccgcgtcaagatcatcgatgatctgagtacaccgcaggccttcattaccaccgacatggatcaaaaccagattacggcgtttcacagcggcgcaatgatgcgttcgtacgaaaatcacgttcgtgatgtgccgggtgttaccttgggcctcgtaggtcctgatggacgcgagggcatgatccaaaatgccgaagaatttgctgctatgggcattccgttcatttttgacccaggtcaggcagtgcctctgttcaacggccccgaactgcgcgaatttatcgaacaggcggactatgtggtggtcaacgattacgaaagccgtcttcttcaagcccgtactggctggaacgagcaggacattgtttcacgcgtgcaggcgtatatcaccacgcaaggttcggctggagccgtggtacatacaccggagaagacctacgatattccggctgctaaaactcgtcgtgtcgttgatccaactggttgcggcgacgcgtttcgcgccggcctgatctatggtattcagcataattatgattggttgaccattggccgcatgggaaacttaatgggtgcgctgaaagtggaacaccctggcacccaaaatcagcgtttcgattttgccgaattcaacgaccagttcaaacaatattttggctacgcgctc

SEQ ID NO: 1510 - protein, 321 aa, synthetic construct
  REGION 1..321: note = variant of adenosine kinase from Xanthemonas campestris
MHHHHHHGGSGMSALICGSLAYDNIMVFPDQFKNHILPDRVHRLNVSFLVGDMRREFGGCAGNIAYNLHLLGGAPIVMATVGQDFGPYREHFETLGIDLSRVKIIDDLSTPQAFITTDMDQNQITAFHSGAMMRSYENHVRDVPGVTLGLVGPDGREGMIQNAEEFAAMGIPFIFDPGQAVPLFNGPELREFIEQADYVVVNDYESRLLQARTGWNEQDIVSRVQAYITTQGSAGAVVHTPEKTYDIPAAKTRRVVDPTGCGDAFRAGLIYGIQHNYDWLTIGRMGNLMGALKVEHPGTQNQRFDFAEFNDQFKQYFGYAL

SEQ ID NO: 1511 - DNA, 963 bp, synthetic construct
  misc_feature 1..963: note = variant of adenosine kinase from Xanthemonas campestris
  source 1..963: mol_type = other DNA
atgcatcatcaccatcaccatggggggtccggtatgagtgcactcatttgcggttctttagcgtatgataacatcatggtgtttccggaccagttcaagaaccatattctgcccgatcgtgttcaccgcctcaatgtcagctttatggtatttgacatgcgtcgtgaatttggaggctgtgccggcaacattgcgtacaatctgcatctgttgggtggtgctccgatcgtaatggctacggtgggccaagatttcggtccgtatcgcgaacacttcgaaactctgggcattgacttatcccgcgtcaagatcatcgatgatctgagtacaccgcaggccttcattaccaccgacatggatcaaaaccagattacggcgtttcacagcggcgcaatgatgcgttcgtacgaaaatcacgttcgtgatgtgccgggtgttaccttgggcctcgtaggtcctgatggacgcgagggcatgatccaaaatgccgaagaatttgctgctatgggcgttccgttcatttttgacccaggtcaggcagtgcctctgttcaacggccccgaactgcgcgaatttatcgaacaggcggactatgtggtggtcaacgattacgaaagccgtcttcttcaagcccgtactggctggaacgagcaggacattgtttcacgcgtgcaggcgtatatcaccacgcaaggttcggctggagccgtggtacatacaccggagaagacctacgatattccggctgctaaaactcgtcgtgtcgttgatccaactggttgcggcgacgcgtttcgcgccggcctgatctggggtattcagcataattatgattggttgaccattggccgcatgggaaacttaatgggtgcgctgaaagtggaacaccctggcacccaaaatcagcgtttcgattttgccgaattcaacgaccagttcaaacaatattttggctacgcgctc

SEQ ID NO: 1512 - protein, 321 aa, synthetic construct
  REGION 1..321: note = variant of adenosine kinase from Xanthemonas campestris
MHHHHHHGGSGMSALICGSLAYDNIMVFPDQFKNHILPDRVHRLNVSFMVFDMRREFGGCAGNIAYNLHLLGGAPIVMATVGQDFGPYREHFETLGIDLSRVKIIDDLSTPQAFITTDMDQNQITAFHSGAMMRSYENHVRDVPGVTLGLVGPDGREGMIQNAEEFAAMGVPFIFDPGQAVPLFNGPELREFIEQADYVVVNDYESRLLQARTGWNEQDIVSRVQAYITTQGSAGAVVHTPEKTYDIPAAKTRRVVDPTGCGDAFRAGLIWGIQHNYDWLTIGRMGNLMGALKVEHPGTQNQRFDFAEFNDQFKQYFGYAL

SEQ ID NO: 1513 - DNA, 963 bp, synthetic construct
  misc_feature 1..963: note = variant of adenosine kinase from Xanthemonas campestris
  source 1..963: mol_type = other DNA
atgcatcatcaccatcaccatggggggtccggtatgagtgcactcatttgcggttctttagcgtatgataacatcatggtgtttccggaccagttcaagaaccatattctgcccgatcgtgttcaccgcctcaatgtcagctttatggtatttgacatgcgtcgtgaatttggaggctgtgccggcaacattgcgtacaatctgcatctgttgggtggtgctccgatcgtaatggctacggtgggccaagatttcggtccgtatcgcgaacacttcgaaactctgggcattgacttatcccgcgtcaagatcatcgatgatctgagtacaccgcaggccttcattaccaccgacatggatcaaaaccagattacggcgtttcacagcggcgcaatgatgcgttcgtacgaaaatcacgttcgtgatgtgccgggtgttaccttgggcctcgtaggtcctgatggacgcgagggcatgatccaaaatgccgaagaatttgctgctatgggctgcccgttcatttttgacccaggtcaggcagtgcctctgttcaacggccccgaactgcgcgaatttatcgaacaggcggactatgtggtggtcaacgattacgaaagccgtcttcttcaagcccgtactggctggaacgagcaggacattgtttcacgcgtgcaggcgtatatcaccacgcaaggttcggctggagccgtggtacatacaccggagaagacctacgatattccggctgctaaaactcgtcgtgtcgttgatccaactggttgcggcgacgcgtttcgcgccggcctgatctggggtattcagcataattatgattggttgaccattggccgcatgggaaacttaatgggtgcgctgaaagtggaacaccctggcacccaaaatcagcgtttcgattttgccgaattcaacgaccagttcaaacaatattttggctacgcgctc

SEQ ID NO: 1514 - protein, 321 aa, synthetic construct
  REGION 1..321: note = variant of adenosine kinase from Xanthemonas campestris
MHHHHHHGGSGMSALICGSLAYDNIMVFPDQFKNHILPDRVHRLNVSFMVFDMRREFGGCAGNIAYNLHLLGGAPIVMATVGQDFGPYREHFETLGIDLSRVKIIDDLSTPQAFITTDMDQNQITAFHSGAMMRSYENHVRDVPGVTLGLVGPDGREGMIQNAEEFAAMGCPFIFDPGQAVPLFNGPELREFIEQADYVVVNDYESRLLQARTGWNEQDIVSRVQAYITTQGSAGAVVHTPEKTYDIPAAKTRRVVDPTGCGDAFRAGLIWGIQHNYDWLTIGRMGNLMGALKVEHPGTQNQRFDFAEFNDQFKQYFGYAL

SEQ ID NO: 1515 - DNA, 963 bp, synthetic construct
  misc_feature 1..963: note = variant of adenosine kinase from Xanthemonas campestris
  source 1..963: mol_type = other DNA
atgcatcatcaccatcaccatggggggtccggtatgagtgcactcatttgcggttctttagcgtatgataacatcatggtgtttccggaccagttcaagaaccatattctgcccgatcgcgttcaccgcctcaatgtcagctttcttgtgccggatatgcgtcgtgaatttggaggctgtgccggcaacattgcgtacaatctgcatctgttgggtggtgctccgatcgtaatggctacggtgggccaagatttcggtccgtatcgcgagcacttcgaaactctgggcattgacttatcccgcgtcaagatcatcaccgatctgagtacaccgcaggccttcattaccaccgacatggatcaaaaccagattacggcgtttcacagcggcgcaatgatgcgttcgtacgaaaatcacgttcgtgatgtgccgggtgttaccttgggcctcgtaggtcctgatggacgcgagggcatgatccaaaatgccgaagaatttgctgctatgggcattccgttcatttttgacccaggtcaggcagtgcctctgttcaacggccccgaactgcgcgagtttatcgaacaggcggactatgtggtggtcaacgattacgaaagccgtcttcttcaaaaacgtactggctggaacgagcaggacattgcgtcacgcgtgcaggcgtatatcaccacgcaaggttcggctggagccgtggtacatacaccggagaagacctacgatattccggctgctaaaactcgtcgtgtcgttgatccaactggttgcggcgacgcgtttcgcgccggcctgatctatggtattcagcataattatgattggttgaccattggccgcatgggaaacttaatgggtgcgctgaaagtggaacaccctggcacccaaaatcagcgtttcgattttgccgaattcaacgaccagttcaaacaatattttggctacgcgctc

SEQ ID NO: 1516 - protein, 321 aa, synthetic construct
  REGION 1..321: note = variant of adenosine kinase from Xanthemonas campestris
MHHHHHHGGSGMSALICGSLAYDNIMVFPDQFKNHILPDRVHRLNVSFLVPDMRREFGGCAGNIAYNLHLLGGAPIVMATVGQDFGPYREHFETLGIDLSRVKIITDLSTPQAFITTDMDQNQITAFHSGAMMRSYENHVRDVPGVTLGLVGPDGREGMIQNAEEFAAMGIPFIFDPGQAVPLFNGPELREFIEQADYVVVNDYESRLLQKRTGWNEQDIASRVQAYITTQGSAGAVVHTPEKTYDIPAAKTRRVVDPTGCGDAFRAGLIYGIQHNYDWLTIGRMGNLMGALKVEHPGTQNQRFDFAEFNDQFKQYFGYAL

SEQ ID NO: 1517 - DNA, 963 bp, synthetic construct
  misc_feature 1..963: note = variant of adenosine kinase from Xanthemonas campestris
  source 1..963: mol_type = other DNA
atgcatcatcaccatcaccatggggggtccggtatgagtgcactcatttgcggttctttagcgtatgataacatcatggtgtttccggaccagttcaagaaccatattctgcccgatcgcgttcaccgcctcaatgtcagctttcttgtaccggacatgcgtcgtgaatttggaggctgtgccggcaacattgcgtacaatctgcatctgttgggtggtgctccgatcgtaatggctacggtgggccaagatttcggtccgtatcgcgagcacttcgaaactctgggcattgacttatcccgcgtcaagatcatcgatgatctgagtacaccgcaggccttcattaccaccgacatggatcaaaaccagattacggcgtttcacagcggcgcaatgatgcgttcgtacgaaaatcacgttcgtgatgtgccgggtgttaccttgggcctcgtaggtcctgatggacgcgagggcatgatccaaaatgccgaagaatttgctgctatgggcattccgttcatttttgacccaggtcaggcagtgcctctgttcaacggccccgaactgcgcgagtttatcgaacaggcggactatgtggtggtcaacgattacgaaagccgtcttcttcaaaaacgtactggctggaacgagcaggacattgtttcacgcgtgcaggcgtatatcaccacgcaaggttcggctggagccgtggtacatacaccggagaagacctacgatattccggctgctaaaactcgtcgtgtcgttgatccaactggttgcggcgacgcgtttcgcgccggcctgatctatggtattcagcataattatgattggttgaccattggccgcatgggaaacttaatgggtgcgctgaaagtggaacaccctggcacccaaaatcagcgtttcgattttgccgaattcaacgaccagttcaaacaatattttggctacgcgctc

SEQ ID NO: 1518 - protein, 321 aa, synthetic construct
  REGION 1..321: note = variant of adenosine kinase from Xanthemonas campestris
MHHHHHHGGSGMSALICGSLAYDNIMVFPDQFKNHILPDRVHRLNVSFLVPDMRREFGGCAGNIAYNLHLLGGAPIVMATVGQDFGPYREHFETLGIDLSRVKIIDDLSTPQAFITTDMDQNQITAFHSGAMMRSYENHVRDVPGVTLGLVGPDGREGMIQNAEEFAAMGIPFIFDPGQAVPLFNGPELREFIEQADYVVVNDYESRLLQKRTGWNEQDIVSRVQAYITTQGSAGAVVHTPEKTYDIPAAKTRRVVDPTGCGDAFRAGLIYGIQHNYDWLTIGRMGNLMGALKVEHPGTQNQRFDFAEFNDQFKQYFGYAL

SEQ ID NO: 1519 - DNA, 963 bp, synthetic construct
  misc_feature 1..963: note = variant of adenosine kinase from Xanthemonas campestris
  source 1..963: mol_type = other DNA
atgcatcatcaccatcaccatggggggtccggtatgagtgcactcatttgcggttctttagcgtatgataacatcatggtgtttccggaccagttcaagaaccatattctgcccgatcgcgttcaccgcctcaatgtcagctttcttgtgccggatatgcgtcgtgaatttggaggctgtgccggcaacattgcgtacaatctgcatctgttgggtggtgctccgatcgtaatggctacggtgggccaagatttcggtccgtatcgcgagcacttcgaaactctgggcattgacttatcccgcgtcaagatcatcgatgatctgagtacaccgcaggccttcattaccaccgacatggatcaaaaccagattacggcgtttcacagcggcgcaatgatgcgttcgtacgaaaatcacgttcgtgatgtgccgggtgttaccttgggcctcgtaggtcctgatggacgcgagggcatgatccaaaatgccgaagaatttgctgctatgggcattccgttcatttttgacccaggtcaggcagtgcctctgttcaacggccatgaactgcgcgagtttatcgaacaggcggactatgtggtggtcaacgattacgaaagccgtcttcttcaagcgcgtactggctggaacgagcaggacattgcgtcacgcgtgcaggcgtatatcaccacgcaaggttcggctggagccgtggtacatacaccggagaagacctacgatattccggctgctaaaactcgtcgtgtcgttgatccaactggttgcggcgacgcgtttcgcgccggcctgatctatggtattcagcataattatgattggttgaccattggccgcatgggaaacttaatgggtgcgctgaaagtggaacaccctggcacccaaaatcagcgtttcgattttgccgaattcaacgaccagttcaaacaatattttggctacgcgctc

SEQ ID NO: 1520 - protein, 321 aa, synthetic construct
  REGION 1..321: note = variant of adenosine kinase from Xanthemonas campestris
MHHHHHHGGSGMSALICGSLAYDNIMVFPDQFKNHILPDRVHRLNVSFLVPDMRREFGGCAGNIAYNLHLLGGAPIVMATVGQDFGPYREHFETLGIDLSRVKIIDDLSTPQAFITTDMDQNQITAFHSGAMMRSYENHVRDVPGVTLGLVGPDGREGMIQNAEEFAAMGIPFIFDPGQAVPLFNGHELREFIEQADYVVVNDYESRLLQARTGWNEQDIASRVQAYITTQGSAGAVVHTPEKTYDIPAAKTRRVVDPTGCGDAFRAGLIYGIQHNYDWLTIGRMGNLMGALKVEHPGTQNQRFDFAEFNDQFKQYFGYAL

SEQ ID NO: 1521 - DNA, 963 bp, synthetic construct
  misc_feature 1..963: note = variant of adenosine kinase from Xanthemonas campestris
  source 1..963: mol_type = other DNA
atgcatcatcaccatcaccatggggggtccggtatgagtgcactcatttgcggttctttagcgtatgataacatcatggtgtttccggaccagttcaagaaccatattctgcccgatcgtgttcaccgcctcaatgtcagctttatggtaccggacatgcgtcgtgaatttggaggctgtgccggcaacattgcgtacaatctgcatctgttgggtggtgctccgatcgtaatggctacggtgggccaagatttcggtccgtatcgcgaacacttcgaaactctgggcattgacttatcccgcgtcaagatcatcgatgatctgagtacaccgcaggccttcattaccaccgacatggatcaaaaccagattacggcgtttcacagcggcgcaatgatgcgttcgtacgaaaatcacgttcgtgatgtgccgggtgttaccttgggcctcgtaggtcctgatggacgcgagggcatgatccaaaatgccgaagaatttgctgctatgggctgcccgttcatttttgacccaggtcaggcagtgcctctgttcaacggccccgaactgcgctggtttatcgaacaggcggactatgtggtggtcaacgattacgaaagccgtcttcttcaagcccgtactggctggaacgagcaggacattgtttcacgcgtgcaggcgtatatcaccacgcaaggttcggctggagccgtggtacatacaccggagaagacctacgatattccggctgctaaaactcgtcgtgtcgttgatccaactggttgcggcgacgcgtttcgcgccggcctgatctatggtattcagcataattatgattggttgaccattggccgcatgggaaacttaatgggtgcgctgaaagtggaacaccctggcacccaaaatcagcgtttcgattttgccgaattcaacgaccagttcagccaatattttggctacgcgctc

SEQ ID NO: 1522 - protein, 321 aa, synthetic construct
  REGION 1..321: note = variant of adenosine kinase from Xanthemonas campestris
MHHHHHHGGSGMSALICGSLAYDNIMVFPDQFKNHILPDRVHRLNVSFMVPDMRREFGGCAGNIAYNLHLLGGAPIVMATVGQDFGPYREHFETLGIDLSRVKIIDDLSTPQAFITTDMDQNQITAFHSGAMMRSYENHVRDVPGVTLGLVGPDGREGMIQNAEEFAAMGCPFIFDPGQAVPLFNGPELRWFIEQADYVVVNDYESRLLQARTGWNEQDIVSRVQAYITTQGSAGAVVHTPEKTYDIPAAKTRRVVDPTGCGDAFRAGLIYGIQHNYDWLTIGRMGNLMGALKVEHPGTQNQRFDFAEFNDQFSQYFGYAL

SEQ ID NO: 1523 - DNA, 963 bp, synthetic construct
  misc_feature 1..963: note = variant of adenosine kinase from Xanthemonas campestris
  source 1..963: mol_type = other DNA
atgcatcatcaccatcaccatggggggtccggtatgagtgcactcatttgcggttctttagcgtatgataacatcatggtgtttccggaccagttcaagaaccatattctgcccgatcgtgttcaccgcctcaatgtcagctttctggtaggcgacatgcgtcgtgaatttggaggctgtgccggcaacattgcgtacaatctgcatctgttgggtggtgctccgatcgtaatggctacggtgggccaagatttcggtccgtatcgcgaacacttcgaaactctgggcattgacttatcccgcgtcaagatcatcgatgatctgagtacaccgcaggccttcattaccaccgacatggatcaaaaccagattacggcgtttcacagcggcgcaatgatgcgttcgtacgaaaatcacgttcgtgatgtgccgggtgttaccttgggcctcgtaggtcctgatggacgcgagggcatgatccaaaatgccgaagaatttgctgctatgggcattccgttcatttttgacccaggtcaggcagtgcctctgttcaacggccccgaactgcgctggtttatcgaacaggcggactatgtggtggtcaacgattacgaaagccgtcttcttcaagcccgtactggctggaacgagcaggacattgtttcacgcgtgcaggcgtatatcaccacgcaaggttcggctggagccgtggtacatacaccggagaagacctacgatattccggctgctaaaactcgtcgtgtcgttgatccaactggttgcggcgacgcgtttcgcgccggcctgatctggggtattcagcataattatgattggttgaccattggccgcatgggaaacttaatgggtgcgctgaaagtggaacaccctggcacccaaaatcagcgtttcgattttgccgaattcaacgaccagttcaaacaatattttggctacgcgctc

SEQ ID NO: 1524 - protein, 321 aa, synthetic construct
  REGION 1..321: note = variant of adenosine kinase from Xanthemonas campestris
MHHHHHHGGSGMSALICGSLAYDNIMVFPDQFKNHILPDRVHRLNVSFLVGDMRREFGGCAGNIAYNLHLLGGAPIVMATVGQDFGPYREHFETLGIDLSRVKIIDDLSTPQAFITTDMDQNQITAFHSGAMMRSYENHVRDVPGVTLGLVGPDGREGMIQNAEEFAAMGIPFIFDPGQAVPLFNGPELRWFIEQADYVVVNDYESRLLQARTGWNEQDIVSRVQAYITTQGSAGAVVHTPEKTYDIPAAKTRRVVDPTGCGDAFRAGLIWGIQHNYDWLTIGRMGNLMGALKVEHPGTQNQRFDFAEFNDQFKQYFGYAL

SEQ ID NO: 1525 - DNA, 963 bp, synthetic construct
  misc_feature 1..963: note = variant of adenosine kinase from Xanthemonas campestris
  source 1..963: mol_type = other DNA
atgcatcatcaccatcaccatggggggtccggtatgagtgcactcatttgcggttctttagcgtatgataacatcatggtgtttccggaccagttcaagaaccatattctgcccgatcgtgttcaccgcctcaatgtcagctttctggtaggcgacatgcgtcgtgaatttggaggctgtgccggcaacattgcgtacaatctgcatctgttgggtggtgctccgatcgtaatggctacggtgggccaagatttcggtccgtatcgcagccacttcgaaactctgggcattgacttatcccgcgtcaagatcatcgatgatctgagtacaccgcaggccttcattaccaccgacatggatcaaaaccagattacggcgtttcacagcggcgcaatgatgcgttcgtacgaaaatcacgttcgtgatgtgccgggtgttaccttgggcctcgtaggtcctgatggacgcgagggcatgatccaaaatgccgaagaatttgctgctatgggctgcccgttcatttttgacccaggtcaggcagtgcctctgttcaacggccccgaactgcgctggtttatcgaacaggcggactatgtggtggtcaacgattacgaaagccgtcttcttcaagcccgtactggctggaacgagcaggacattgtttcacgcgtgcaggcgtatatcaccacgcaaggttcggctggagccgtggtacatacaccggagaagacctacgatattccggctgctaaaactcgtcgtgtcgttgatccaactggttgcggcgacgcgtttcgcgccggcctgatctggggtattcagcataattatgattggttgaccattggccgcatgggaaacttaatgggtgcgctgaaagtggaacaccctggcacccaaaatcagcgtttcgattttgccgaattcaacgaccagttcaaacaatattttggctacgcgctc

SEQ ID NO: 1526 - protein, 321 aa, synthetic construct
  REGION 1..321: note = variant of adenosine kinase from Xanthemonas campestris
MHHHHHHGGSGMSALICGSLAYDNIMVFPDQFKNHILPDRVHRLNVSFLVGDMRREFGGCAGNIAYNLHLLGGAPIVMATVGQDFGPYRSHFETLGIDLSRVKIIDDLSTPQAFITTDMDQNQITAFHSGAMMRSYENHVRDVPGVTLGLVGPDGREGMIQNAEEFAAMGCPFIFDPGQAVPLFNGPELRWFIEQADYVVVNDYESRLLQARTGWNEQDIVSRVQAYITTQGSAGAVVHTPEKTYDIPAAKTRRVVDPTGCGDAFRAGLIWGIQHNYDWLTIGRMGNLMGALKVEHPGTQNQRFDFAEFNDQFKQYFGYAL

SEQ ID NO: 1527 - DNA, 963 bp, synthetic construct
  misc_feature 1..963: note = variant of adenosine kinase from Xanthemonas campestris
  source 1..963: mol_type = other DNA
atgcatcatcaccatcaccatggggggtccggtatgagtgcactcatttgcggttctttagcgtatgataacatcatggtgtttccggaccagttcaagaaccatattctgcccgatcgcgttcaccgcctcaatgtcagctttcttgtgccgaccatgcgtcgtgaatttggaggctgtgccggcaacattgcgtacaatctgcatctgttgggtggtgctccgatcgtaatggctacggtgggccaagatttcggtccgtatcgcgagcacttcgaaactctgggcattgacttatcccgcgtcaagatcatcgatgatctgagtacaccgcaggccttcattaccaccgacatggatcaaaaccagattacggcgtttcacagcggcgcaatgatgcgttcgtacgaaaatcacgttcgtgatgtgccgggtgttaccttgggcctcgtaggtcctgatggacgcgagggcatgatccaaaatgccgaagaatttgctgctatgggcattccgttcatttttgacccaggtcaggcagtgcctctgttcaacggccctgaactgcgcgagtttatcgaacaggcggactatgtggtggtcaacgattacgaaagccgtcttcttcaagcgcgtactggctggaacgagcaggacattgcgtcacgcgtgcaggcgtatatcaccacgcaaggttcggctggagccgtggtacatacaccggagaagacctacgatattccggctgctaaaactcgtcgtgtcgttgatccaactggttgcggcgacgcgtttcgcgccggcctgatctatggtattcagcataattatgattggttgaccattggccgcatgggaaacttaatgggtgcgctgaaagtggaacaccctggcacccaaaatcagcgtttcgattttgccgaattcaacgaccagttcaaacaatattttggctacgcgctc

SEQ ID NO: 1528 - protein, 321 aa, synthetic construct
  REGION 1..321: note = variant of adenosine kinase from Xanthemonas campestris
MHHHHHHGGSGMSALICGSLAYDNIMVFPDQFKNHILPDRVHRLNVSFLVPTMRREFGGCAGNIAYNLHLLGGAPIVMATVGQDFGPYREHFETLGIDLSRVKIIDDLSTPQAFITTDMDQNQITAFHSGAMMRSYENHVRDVPGVTLGLVGPDGREGMIQNAEEFAAMGIPFIFDPGQAVPLFNGPELREFIEQADYVVVNDYESRLLQARTGWNEQDIASRVQAYITTQGSAGAVVHTPEKTYDIPAAKTRRVVDPTGCGDAFRAGLIYGIQHNYDWLTIGRMGNLMGALKVEHPGTQNQRFDFAEFNDQFKQYFGYAL

SEQ ID NO: 1529 - DNA, 963 bp, synthetic construct
  misc_feature 1..963: note = variant of adenosine kinase from Xanthemonas campestris
  source 1..963: mol_type = other DNA
atgcatcatcaccatcaccatggggggtccggtatgagtgcactcatttgcggttctttagcgtatgataacatcatggtgtttccggaccagttcaagaaccatattctgcccgatcgtgttcaccgcctcaatgtcagctttcttgtaccggacatgcgtcgtgaatttggaggctgtgccggcaacattgcgtacaatctgcatctgttgggtggtgctccgatcgtaatggctacggtgggccaagatttcggtccgtatcgcagccacttcgaaactctgggcattgacttatcccgcgtcaagatcatcgatgatctgagtacaccgcaggccttcattaccaccgacatggatcaaaaccagattacggcgtttcacagcggcgcaatgatgcgttcgtacgaaaatcacgttcgtgatgtgccgggtgttaccttgggcctcgtaggtcctgatggacgcgagggcatgatccaaaatgccgaagaatttgctgctatgggctgcccgttcatttttgacccaggtcaggcagtgcctctgttcaacggccccgaactgcgctggtttatcgaacaggcggactatgtggtggtcaacgattacgaaagccgtcttcttcaagcccgtactggctggaacgagcaggacattgtttcacgcgtgcaggcgtatatcaccacgcaaggttcggctggagccgtggtacatacaccggagaagacctacgatattccggctgctaaaactcgtcgtgtcgttgatccaactggttgcggcgacgcgtttcgcgccggcctgatctggggtattcagcataattatgattggttgaccattggccgcatgggaaacttaatgggtgcgctgaaagtggaacaccctggcacccaaaatcagcgtttcgattttgccgaattcaacgaccagttcaaacaatattttggctacgcgctc

SEQ ID NO: 1530 - protein, 321 aa, synthetic construct
  REGION 1..321: note = variant of adenosine kinase from Xanthemonas campestris
MHHHHHHGGSGMSALICGSLAYDNIMVFPDQFKNHILPDRVHRLNVSFLVPDMRREFGGCAGNIAYNLHLLGGAPIVMATVGQDFGPYRSHFETLGIDLSRVKIIDDLSTPQAFITTDMDQNQITAFHSGAMMRSYENHVRDVPGVTLGLVGPDGREGMIQNAEEFAAMGCPFIFDPGQAVPLFNGPELRWFIEQADYVVVNDYESRLLQARTGWNEQDIVSRVQAYITTQGSAGAVVHTPEKTYDIPAAKTRRVVDPTGCGDAFRAGLIWGIQHNYDWLTIGRMGNLMGALKVEHPGTQNQRFDFAEFNDQFKQYFGYAL

SEQ ID NO: 1531 - DNA, 963 bp, synthetic construct
  misc_feature 1..963: note = variant of adenosine kinase from Xanthemonas campestris
  source 1..963: mol_type = other DNA
atgcatcatcaccatcaccatggggggtccggtatgagtgcactcatttgcggttctttagcgtatgataacatcatggtgtttccggaccagttcaagaaccatattctgcccgatcgtgttcaccgcctcaatgtcagctttcttgtaccggacatgcgtcgtgaatttggaggctgtgccggcaacattgcgtacaatctgcatctgttgggtggtgctccgatcgtaatggctacggtgggccaagatttcggtccgtatcgcgagcacttcgaaactctgggcattgacttatcccgcgtcaagatcatcgatgatctgagtacaccgcaggccttcattaccaccgacatggatcaaaaccagattacggcgtttcacagcggcgcaatgatgcgttcgtacgaaaatcacgttcgtgatgtgccgggtgttaccttgggcctcgtaggtcctgatggacgcgagggcatgatccaaaatgccgaagaatttgctgctatgggcattccgttcatttttgacccaggtcaggcagtgcctctgttcaacggccccgaactgcgctggtttatcgaacaggcggactatgtggtggtcaacgattacgaaagccgtcttcttcaagcccgtactggctggaacgagcaggacattgtttcacgcgtgcaggcgtatatcaccacgcaaggttcggctggagccgtggtacatacaccggagaagacctacgatattccggctgctaaaactcgtcgtgtcgttgatccaactggttgcggcgacgcgtttcgcgccggcctgatctggggtattcagcataattatgattggttgaccattggccgcatgggaaacttaatgggtgcgctgaaagtggaacaccctggcacccaaaatcagcgtttcgattttgccgaattcaacgaccagttcaaacaatattttggctacgcgctc

SEQ ID NO: 1532 - protein, 321 aa, synthetic construct
  REGION 1..321: note = variant of adenosine kinase from Xanthemonas campestris
MHHHHHHGGSGMSALICGSLAYDNIMVFPDQFKNHILPDRVHRLNVSFLVPDMRREFGGCAGNIAYNLHLLGGAPIVMATVGQDFGPYREHFETLGIDLSRVKIIDDLSTPQAFITTDMDQNQITAFHSGAMMRSYENHVRDVPGVTLGLVGPDGREGMIQNAEEFAAMGIPFIFDPGQAVPLFNGPELRWFIEQADYVVVNDYESRLLQARTGWNEQDIVSRVQAYITTQGSAGAVVHTPEKTYDIPAAKTRRVVDPTGCGDAFRAGLIWGIQHNYDWLTIGRMGNLMGALKVEHPGTQNQRFDFAEFNDQFKQYFGYAL

SEQ ID NO: 1533 - DNA, 963 bp, synthetic construct
  misc_feature 1..963: note = variant of adenosine kinase from Xanthemonas campestris
  source 1..963: mol_type = other DNA
atgcatcatcaccatcaccatggggggtccggtatgagtgcactcatttgcggttctttagcgtatgataacatcatggtgtttccggaccagttcaagaaccatattctgcccgatcgtgttcaccgcctcaatgtcagctttcttgtaccggacatgcgtcgtgaatttggaggctgtgccggcaacattgcgtacaatctgcatctgttgggtggtgctccgatcgtaatggctacggtgggccaagatttcggtccgtatcgcgagcacttcgaaactctgggcattgacttatcccgcgtcaagatcatcgatgatctgagtacaccgcaggccttcattaccaccgacatggatcaaaaccagattacggcgtttcacagcggcgcaatgatgcgttcgtacgaaaatcacgttcgtgatgtgccgggtgttaccttgggcctcgtaggtcctgatggacgcgagggcatgatccaaaatgccgaagaatttgctgctatgatgattccgttcatttttgacccaggtcaggcagtgcctctgttcaacggccccgaactgcgcgagtttatcgaacaggcggactatgtggtggtcaacgattacgaaagccgtcttcttcaagcccgtactggctggaacgagcaggacattgcgtcacgcgtgcaggcgtatatcaccacgcaaggttcggctggagccgtggtacatacaccggagaagacctacgatattccggctgctaaaactcgtcgtgtcgttgatccaactggttgcggcgacgcgtttcgcgccggcctgatctatggtattcagcataattatgattggttgaccattggccgcatgggaaacttaatgggtgcgctgaaagtggaacaccctggcacccaaaatcagcgtttcgattttgccgaattcaacgaccagttcaaacaatattttggctacgcgctc

SEQ ID NO: 1534 - protein, 321 aa, synthetic construct
  REGION 1..321: note = variant of adenosine kinase from Xanthemonas campestris
MHHHHHHGGSGMSALICGSLAYDNIMVFPDQFKNHILPDRVHRLNVSFLVPDMRREFGGCAGNIAYNLHLLGGAPIVMATVGQDFGPYREHFETLGIDLSRVKIIDDLSTPQAFITTDMDQNQITAFHSGAMMRSYENHVRDVPGVTLGLVGPDGREGMIQNAEEFAAMMIPFIFDPGQAVPLFNGPELREFIEQADYVVVNDYESRLLQARTGWNEQDIASRVQAYITTQGSAGAVVHTPEKTYDIPAAKTRRVVDPTGCGDAFRAGLIYGIQHNYDWLTIGRMGNLMGALKVEHPGTQNQRFDFAEFNDQFKQYFGYAL

SEQ ID NO: 1535 - DNA, 963 bp, synthetic construct
  misc_feature 1..963: note = variant of adenosine kinase from Xanthemonas campestris
  source 1..963: mol_type = other DNA
atgcatcatcaccatcaccatggggggtccggtatgagtgcactcatttgcggttctttagcgtatgataacatcatggtgtttccggaccagttcaagaaccatattctgcccgatcgcgttcaccgcctcaatgtcagctttctttgcccgaccatgcgtcgtgaatttggaggctgtgccggcaacattgcgtacaatctgcatctgttgggtggtgctccgatcgtaatggctacggtgggccaagatttcggtccgtatcgcgagcacttcgaaactctgggcattgacttatcccgcgtcaagatcatcgatgatctgagtacaccgcaggccttcattaccaccgacatggatcaaaaccagattacggcgtttcacagcggcgcaatgatgcgttcgtacgaaaatcacgttcgtgatgtgccgggtgttaccttgggcctcgtaggtcctgatggacgcgagggcatgatccaaaatgccgaagaatttgctgctatgggcattccgttcatttttgacccaggtcaggcagtgcctctgttcaacggccctgaactgcgcgagtttatcgaacaggcggactatgtggtggtcaacgattacgaaagccgtcttcttcaagcgcgtactggctggaacgagcaggacattgtttcacgcgtgcaggcgtatatcaccacgcaaggttcggctggagccgtggtacatacaccggagaagacctacgatattccggctgctaaaactcgtcgtgtcgttgatccaactggttgcggcgacgcgtttcgcgccggcctgatctatggtattcagcataattatgattggttgaccattggccgcatgggaaacttaatgggtgcgctgaaagtggaacaccctggcacccaaaatcagcgtttcgattttgccgaattcaacgaccagttcaaacaatattttggctacgcgctc

SEQ ID NO: 1536 - protein, 321 aa, synthetic construct
  REGION 1..321: note = variant of adenosine kinase from Xanthemonas campestris
MHHHHHHGGSGMSALICGSLAYDNIMVFPDQFKNHILPDRVHRLNVSFLCPTMRREFGGCAGNIAYNLHLLGGAPIVMATVGQDFGPYREHFETLGIDLSRVKIIDDLSTPQAFITTDMDQNQITAFHSGAMMRSYENHVRDVPGVTLGLVGPDGREGMIQNAEEFAAMGIPFIFDPGQAVPLFNGPELREFIEQADYVVVNDYESRLLQARTGWNEQDIVSRVQAYITTQGSAGAVVHTPEKTYDIPAAKTRRVVDPTGCGDAFRAGLIYGIQHNYDWLTIGRMGNLMGALKVEHPGTQNQRFDFAEFNDQFKQYFGYAL

SEQ ID NO: 1537 - DNA, 963 bp, synthetic construct
  misc_feature 1..963: note = variant of adenosine kinase from Xanthemonas campestris
  source 1..963: mol_type = other DNA
atgcatcatcaccatcaccatggggggtccggtatgagtgcactcatttgcggttctttagcgtatgataacatcatggtgtttccggaccagttcaagaaccatattctgcccgatcgtgttcaccgcctcaatgtcagctttctttgcccgaccatgcgtcgtgaatttggaggctgtgccggcaacattgcgtacaatctgcatctgttgggtggtgctccgatcgtaatggctacggtgggccaagatttcggtccgtatcgcgagcacttcgaaactctgggcattgacttatcccgcgtcaagatcatcaccgatctgagtacaccgcaggccttcattaccaccgacatggatcaaaaccagattacggcgtttcacagcggcgcaatgatgcgttcgtacgaaaatcacgttcgtgatgtgccgggtgttaccttgggcctcgtaggtcctgatggacgcgagggcatgatccaaaatgccgaagaatttgctgctatgggcattccgttcatttttgacccaggtcaggcagtgcctctgttcaacggccccgaactgcgcgagtttatcgaacaggcggactatgtggtggtcaacgattacgaaagccgtcttcttcaatggcgtactggctggaacgagcaggacattgtttcacgcgtgcaggcgtatatcaccacgcaaggttcggctggagccgtggtacatacaccggagaagacctacgatattccggctgctaaaactcgtcgtgtcgttgatccaactggttgcggcgacgcgtttcgcgccggcctgatctatggtattcagcataattatgattggttgaccattggccgcatgggaaacttaatgggtgcgctgaaagtggaacaccctggcacccaaaatcagcgtttcgattttgccgaattcaacgaccagttcaaacaatattttggctacgcgctc

SEQ ID NO: 1538 - protein, 321 aa, synthetic construct
  REGION 1..321: note = variant of adenosine kinase from Xanthemonas campestris
MHHHHHHGGSGMSALICGSLAYDNIMVFPDQFKNHILPDRVHRLNVSFLCPTMRREFGGCAGNIAYNLHLLGGAPIVMATVGQDFGPYREHFETLGIDLSRVKIITDLSTPQAFITTDMDQNQITAFHSGAMMRSYENHVRDVPGVTLGLVGPDGREGMIQNAEEFAAMGIPFIFDPGQAVPLFNGPELREFIEQADYVVVNDYESRLLQWRTGWNEQDIVSRVQAYITTQGSAGAVVHTPEKTYDIPAAKTRRVVDPTGCGDAFRAGLIYGIQHNYDWLTIGRMGNLMGALKVEHPGTQNQRFDFAEFNDQFKQYFGYAL

SEQ ID NO: 1539 - DNA, 963 bp, synthetic construct
  misc_feature 1..963: note = variant of adenosine kinase from Xanthemonas campestris
  source 1..963: mol_type = other DNA
atgcatcatcaccatcaccatggggggtccggtatgagtgcactcatttgcggttctttagcgtatgataacatcatggtgtttccggaccagttcaagaaccatattctgcccgatcgtgttcaccgcctcaatgtcagctttctttgcccggatatgcgtcgtgaatttggaggctgtgccggcaacattgcgtacaatctgcatctgttgggtggtgctccgatcgtaatggctacggtgggccaagatttcggtccgtatcgcgagcacttcgaaactctgggcattgacttatcccgcgtcaagatcatcgatgatctgagtacaccgcaggccttcattaccaccgacatggatcaaaaccagattacggcgtttcacagcggcgcaatgatgcgttcgtacgaaaatcacgttcgtgatgtgccgggtgttaccttgggcctcgtaggtcctgatggacgcgagggcatgatccaaaatgccgaagaatttgctgctatgggcattccgttcatttttgacccaggtcaggcagtgcctctgttcaacggccctgaactgcgcgagtttatcgaacaggcggactatgtggtggtcaacgattacgaaagccgtcttcttcaaaaacgtactggctggaacgagcaggacattgtttcacgcgtgcaggcgtatatcaccacgcaaggttcggctggagccgtggtacatacaccggagaagacctacgatattccggctgctaaaactcgtcgtgtcgttgatccaactggttgcggcgacgcgtttcgcgccggcctgatctatggtattcagcataattatgattggttgaccattggccgcatgggaaacttaatgggtgcgctgaaagtggaacaccctggcacccaaaatcagcgtttcgattttgccgatttcaacgaccagttcaaacaatattttggctacgcgctc

SEQ ID NO: 1540 - protein, 321 aa, synthetic construct
  REGION 1..321: note = variant of adenosine kinase from Xanthemonas campestris
MHHHHHHGGSGMSALICGSLAYDNIMVFPDQFKNHILPDRVHRLNVSFLCPDMRREFGGCAGNIAYNLHLLGGAPIVMATVGQDFGPYREHFETLGIDLSRVKIIDDLSTPQAFITTDMDQNQITAFHSGAMMRSYENHVRDVPGVTLGLVGPDGREGMIQNAEEFAAMGIPFIFDPGQAVPLFNGPELREFIEQADYVVVNDYESRLLQKRTGWNEQDIVSRVQAYITTQGSAGAVVHTPEKTYDIPAAKTRRVVDPTGCGDAFRAGLIYGIQHNYDWLTIGRMGNLMGALKVEHPGTQNQRFDFADFNDQFKQYFGYAL

SEQ ID NO: 1541 - DNA, 963 bp, synthetic construct
  misc_feature 1..963: note = variant of adenosine kinase from Xanthemonas campestris
  source 1..963: mol_type = other DNA
atgcatcatcaccatcaccatggggggtccggtatgagtgcactcatttgcggttctttagcgtatgataacatcatggtgtttccggaccagttcaagaaccatattctgcccgatcgcgttcaccgcctcaatgtcagctttctttgcccgagcatgcgtcgtgaatttggaggctgtgccggcaacattgcgtacaatctgcatctgttgggtggtgctccgatcgtaatggctacggtgggccaagatttcggtccgtatcgcgagcacttcgaaactctgggcattgacttatcccgcgtcaagatcatcaccgatctgagtacaccgcaggccttcattaccaccgacatggatcaaaaccagattacggcgtttcacagcggcgcaatgatgcgttcgtacgaaaatcacgttcgtgatgtgccgggtgttaccttgggcctcgtaggtcctgatggacgcgagggcatgatccaaaatgccgaagaatttgctgctatgggcattccgttcatttttgacccaggtcaggcagtgcctctgttcaacggccctgaactgcgcgagtttatcgaacaggcggactatgtggtggtcaacgattacgaaagccgtcttcttcaagcgcgtactggctggaacgagcaggacattgtgtcacgcgtgcaggcgtatatcaccacgcaaggttcggctggagccgtggtacatacaccggagaagacctacgatattccggctgctaaaactcgtcgtgtcgttgatccaactggttgcggcgacgcgtttcgcgccggcctgatctatggtattcagcataattatgattggttgaccattggccgcatgggaaacttaatgggtgcgctgaaagtggaacaccctggcacccaaaatcagcgtttcgattttgccgaattcaacgaccagttcaaacaatattttggctacgcgctc

SEQ ID NO: 1542 - protein, 321 aa, synthetic construct
  REGION 1..321: note = variant of adenosine kinase from Xanthemonas campestris
MHHHHHHGGSGMSALICGSLAYDNIMVFPDQFKNHILPDRVHRLNVSFLCPSMRREFGGCAGNIAYNLHLLGGAPIVMATVGQDFGPYREHFETLGIDLSRVKIITDLSTPQAFITTDMDQNQITAFHSGAMMRSYENHVRDVPGVTLGLVGPDGREGMIQNAEEFAAMGIPFIFDPGQAVPLFNGPELREFIEQADYVVVNDYESRLLQARTGWNEQDIVSRVQAYITTQGSAGAVVHTPEKTYDIPAAKTRRVVDPTGCGDAFRAGLIYGIQHNYDWLTIGRMGNLMGALKVEHPGTQNQRFDFAEFNDQFKQYFGYAL

SEQ ID NO: 1543 - DNA, 963 bp, synthetic construct
  misc_feature 1..963: note = variant of adenosine kinase from Xanthemonas campestris
  source 1..963: mol_type = other DNA
atgcatcatcaccatcaccatggggggtccggtatgagtgcactcatttgcggttctttagcgtatgataacatcatggtgtttccggaccagttcaagaaccatattctgcccgatatggttcaccgcctcaatgtcagctttcttgtaccggacatgcgtcgtgaatttggaggctgtgccggcaacattgcgtacaatctgcatctgttgggtggtgctccgatcgtaatggctacggtgggccaagatttcggtccgtatcgcgagcacttcgaaactctgggcattgacttatcccgcgtcaagatcatcgatgatctgagtacaccgcaggccttcattaccaccgacatggatcaaaaccagattacggcgtttcacagcggcgcaatgatgcgttcgtacgaaaatcacgttcgtgatgtgccgggtgttaccttgggcctcgtaggtcctgatggacgcgagggcatgatccaaaatgccgaagaatttgctgctatgggcattccgttcatttttgacccaggtcaggcagtgcctctgttcaacggccccgaactgcgcgagtttatcgaacaggcggactatgtggtggtcaacgattacgaaagccgtcttcttcaagcccgtactggctggaacgagcaggacattgtgtcacgcgtgcaggcgtatatcaccacgcaaggttcggctggagccgtggtacatacaccggagaagacctacgatattccggctgctaaaactcgtcgtgtcgttgatccaactggttgcggcgacgcgtttcgcgccggcctgatctatggtattcagcataattatgattggttgaccattggccgcatgggaaacttaatgggtgcgctgaaagtggaacaccctggcacccaaaatcagcgtttcgattttgccgaattcaacgaccagttcaaacaatattttggctacgcgctc

SEQ ID NO: 1544 - protein, 321 aa, synthetic construct
  REGION 1..321: note = variant of adenosine kinase from Xanthemonas campestris
MHHHHHHGGSGMSALICGSLAYDNIMVFPDQFKNHILPDMVHRLNVSFLVPDMRREFGGCAGNIAYNLHLLGGAPIVMATVGQDFGPYREHFETLGIDLSRVKIIDDLSTPQAFITTDMDQNQITAFHSGAMMRSYENHVRDVPGVTLGLVGPDGREGMIQNAEEFAAMGIPFIFDPGQAVPLFNGPELREFIEQADYVVVNDYESRLLQARTGWNEQDIVSRVQAYITTQGSAGAVVHTPEKTYDIPAAKTRRVVDPTGCGDAFRAGLIYGIQHNYDWLTIGRMGNLMGALKVEHPGTQNQRFDFAEFNDQFKQYFGYAL

SEQ ID NO: 1545 - DNA, 963 bp, synthetic construct
  misc_feature 1..963: note = variant of adenosine kinase from Xanthemonas campestris
  source 1..963: mol_type = other DNA
atgcatcatcaccatcaccatggggggtccggtatgagtgcactcatttgcggttctttagcgtatgataacatcatggtgtttccggaccagttcaagaaccatattctgcccgatatggttcaccgcctcaatgtcagctttctttgcccggatatgcgtcgtgaatttggaggctgtgccggcaacattgcgtacaatctgcatctgttgggtggtgctccgatcgtaatggctacggtgggccaagatttcggtccgtatcgcgagcacttcgaaactctgggcattgacttatcccgcgtcaagatcatcgatgatctgagtacaccgcaggccttcattaccaccgacatggatcaaaaccagattacggcgtttcacagcggcgcaatgatgcgttcgtacgaaaatcacgttcgtgatgtgccgggtgttaccttgggcctcgtaggtcctgatggacgcgagggcatgatccaaaatgccgaagaatttgctgctatgggcattccgttcatttttgacccaggtcaggcagtgcctctgttcaacggccatgaactgcgcgagtttatcgaacaggcggactatgtggtggtcaacgattacgaaagccgtcttcttcaaaaacgtactggctggaacgagcaggacattgtttcacgcgtgcaggcgtatatcaccacgcaaggttcggctggagccgtggtacatacaccggagaagacctacgatattccggctgctaaaactcgtcgtgtcgttgatccaactggttgcggcgacgcgtttcgcgccggcctgatctatggtattcagcataattatgattggttgaccattggccgcatgggaaacttaatgggtgcgctgaaagtggaacaccctggcacccaaaatcagcgtttcgattttgccgatttcaacgaccagttcaaacaatattttggctacgcgctc

SEQ ID NO: 1546 - protein, 321 aa, synthetic construct
  REGION 1..321: note = variant of adenosine kinase from Xanthemonas campestris
MHHHHHHGGSGMSALICGSLAYDNIMVFPDQFKNHILPDMVHRLNVSFLCPDMRREFGGCAGNIAYNLHLLGGAPIVMATVGQDFGPYREHFETLGIDLSRVKIIDDLSTPQAFITTDMDQNQITAFHSGAMMRSYENHVRDVPGVTLGLVGPDGREGMIQNAEEFAAMGIPFIFDPGQAVPLFNGHELREFIEQADYVVVNDYESRLLQKRTGWNEQDIVSRVQAYITTQGSAGAVVHTPEKTYDIPAAKTRRVVDPTGCGDAFRAGLIYGIQHNYDWLTIGRMGNLMGALKVEHPGTQNQRFDFADFNDQFKQYFGYAL

SEQ ID NO: 1547 - DNA, 963 bp, synthetic construct
  misc_feature 1..963: note = variant of adenosine kinase from Xanthemonas campestris
  source 1..963: mol_type = other DNA
atgcatcatcaccatcaccatggggggtccggtatgagtgcactcatttgcggttctttagcgtatgataacatcatggtgtttccggaccagttcaagaaccatattctgcccgatcgcgttcaccgcctcaatgtcagctttctttgcccgaccatgcgtcgtgaatttggaggctgtgccggcaacattgcgtacaatctgcatctgttgggtggtgctccgatcgtaatggctacggtgggccaagatttcggtccgtatcgcgagcacttcgaaactctgggcattgacttatcccgcgtcaagatcatcaccgatctgagtacaccgcaggccttcattaccaccgacatggatcaaaaccagattacggcgtttcacagcggcgcaatgatgcgttcgtacgaaaatcacgttcgtgatgtgccgggtgttaccttgggcctcgtaggtcctgatggacgcgagggcatgatccaaaatgccgaagaatttgctgctatgatgattccgttcatttttgacccaggtcaggcagtgcctctgttcaacggccatgaactgcgcgagtttatcgaacaggcggactatgtggtggtcaacgattacgaaagccgtcttcttcaagcgcgtactggctggaacgagcaggacattgtttcacgcgtgcaggcgtatatcaccacgcaaggttcggctggagccgtggtacatacaccggagaagacctacgatattccggctgctaaaactcgtcgtgtcgttgatccaactggttgcggcgacgcgtttcgcgccggcctgatctatggtattcagcataattatgattggttgaccattggccgcatgggaaacttaatgggtgcgctgaaagtggaacaccctggcacccaaaatcagcgtttcgattttgccgatttcaacgaccagttcaaacaatattttggctacgcgctc

SEQ ID NO: 1548 - protein, 321 aa, synthetic construct
  REGION 1..321: note = variant of adenosine kinase from Xanthemonas campestris
MHHHHHHGGSGMSALICGSLAYDNIMVFPDQFKNHILPDRVHRLNVSFLCPTMRREFGGCAGNIAYNLHLLGGAPIVMATVGQDFGPYREHFETLGIDLSRVKIITDLSTPQAFITTDMDQNQITAFHSGAMMRSYENHVRDVPGVTLGLVGPDGREGMIQNAEEFAAMMIPFIFDPGQAVPLFNGHELREFIEQADYVVVNDYESRLLQARTGWNEQDIVSRVQAYITTQGSAGAVVHTPEKTYDIPAAKTRRVVDPTGCGDAFRAGLIYGIQHNYDWLTIGRMGNLMGALKVEHPGTQNQRFDFADFNDQFKQYFGYAL

SEQ ID NO: 1549 - DNA, 963 bp, synthetic construct
  misc_feature 1..963: note = variant of adenosine kinase from Xanthemonas campestris
  source 1..963: mol_type = other DNA
atgcatcatcaccatcaccatggggggtccggtatgagtgcactcatttgcggttctttagcgtatgataacatcatggtgtttccggaccagttcaagaaccatattctgcccgatatggttcaccgcctcaatgtcagctttcttgtgccgaccatgcgtcgtgaatttggaggctgtgccggcaacattgcgtacaatctgcatctgttgggtggtgctccgatcgtaatggctacggtgggccaagatttcggtccgtatcgcgagcacttcgaaactctgggcattgacttatcccgcgtcaagatcatcgatgatctgagtacaccgcaggccttcattaccaccgacatggatcaaaaccagattacggcgtttcacagcggcgcaatgatgcgttcgtacgaaaatcacgttcgtgatgtgccgggtgttaccttgggcctcgtaggtcctgatggacgcgagggcatgatccaaaatgccgaagaatttgctgctatgatgattccgttcatttttgacccaggtcaggcagtgcctctgttcaacggccctgaactgcgcgagtttatcgaacaggcggactatgtggtggtcaacgattacgaaagccgtcttcttcaagcgcgtactggctggaacgagcaggacattgtttcacgcgtgcaggcgtatatcaccacgcaaggttcggctggagccgtggtacatacaccggagaagacctacgatattccggctgctaaaactcgtcgtgtcgttgatccaactggttgcggcgacgcgtttcgcgccggcctgatctatggtattcagcataattatgattggttgaccattggccgcatgggaaacttaatgggtgcgctgaaagtggaacaccctggcacccaaaatcagcgtttcgattttgccgaattcaacgaccagttcaaacaatattttggctacgcgctc

SEQ ID NO: 1550 - protein, 321 aa, synthetic construct
  REGION 1..321: note = variant of adenosine kinase from Xanthemonas campestris
MHHHHHHGGSGMSALICGSLAYDNIMVFPDQFKNHILPDMVHRLNVSFLVPTMRREFGGCAGNIAYNLHLLGGAPIVMATVGQDFGPYREHFETLGIDLSRVKIIDDLSTPQAFITTDMDQNQITAFHSGAMMRSYENHVRDVPGVTLGLVGPDGREGMIQNAEEFAAMMIPFIFDPGQAVPLFNGPELREFIEQADYVVVNDYESRLLQARTGWNEQDIVSRVQAYITTQGSAGAVVHTPEKTYDIPAAKTRRVVDPTGCGDAFRAGLIYGIQHNYDWLTIGRMGNLMGALKVEHPGTQNQRFDFAEFNDQFKQYFGYAL

SEQ ID NO: 1551 - DNA, 963 bp, synthetic construct
  misc_feature 1..963: note = variant of adenosine kinase from Xanthemonas campestris
  source 1..963: mol_type = other DNA
atgcatcatcaccatcaccatggggggtccggtatgagtgcactcatttgcggttctttagcgtatgataacatcatggtgtttccggaccagttcaagaaccatattctgcccgatcgcgttcaccgcctcaatgtcagctttctttgcccggatatgcgtcgtgaatttggaggctgtgccggcaacattgcgtacaatctgcatctgttgggtggtgctccgatcgtaatggctacggtgggccaagatttcggtccgtatcgcgagcacttcgaaactctgggcattgacttatcccgcgtcaagatcatcaccgatctgagtacaccgcaggccttcattaccaccgacatggatcaaaaccagattacggcgtttcacagcggcgcaatgatgcgttcgtacgaaaatcacgttcgtgatgtgccgggtgttaccttgggcctcgtaggtcctgatggacgcgagggcatgatccaaaatgccgaagaatttgctgctatgggcattccgttcatttttgacccaggtcaggcagtgcctctgttcaacggccccgaactgcgcgagtttatcgaacaggcggactatgtggtggtcaacgattacgaaagccgtcttcttcaagcgcgtactggctggaacgagcaggacattgtttcacgcgtgcaggcgtatatcaccacgcaaggttcggctggagccgtggtacatacaccggagaagacctacgatattccggctgctaaaactcgtcgtgtcgttgatccaactggttgcggcgacgcgtttcgcgccggcctgatctatggtattcagcataattatgattggttgaccattggccgcatgggaaacttaatgggtgcgctgaaagtggaacaccctggcacccaaaatcagcgtttcgattttgccgaattcaacgaccagttcaaacaatattttggctacgcgctc

SEQ ID NO: 1552 - protein, 321 aa, synthetic construct
  REGION 1..321: note = variant of adenosine kinase from Xanthemonas campestris
MHHHHHHGGSGMSALICGSLAYDNIMVFPDQFKNHILPDRVHRLNVSFLCPDMRREFGGCAGNIAYNLHLLGGAPIVMATVGQDFGPYREHFETLGIDLSRVKIITDLSTPQAFITTDMDQNQITAFHSGAMMRSYENHVRDVPGVTLGLVGPDGREGMIQNAEEFAAMGIPFIFDPGQAVPLFNGPELREFIEQADYVVVNDYESRLLQARTGWNEQDIVSRVQAYITTQGSAGAVVHTPEKTYDIPAAKTRRVVDPTGCGDAFRAGLIYGIQHNYDWLTIGRMGNLMGALKVEHPGTQNQRFDFAEFNDQFKQYFGYAL

SEQ ID NO: 1553 - DNA, 963 bp, synthetic construct
  misc_feature 1..963: note = variant of adenosine kinase from Xanthemonas campestris
  source 1..963: mol_type = other DNA
atgcatcatcaccatcaccatggggggtccggtatgagtgcactcatttgcggttctttagcgtatgataacatcatggtgtttccggaccagttcaagaaccatattctgcccgatcgcgttcaccgcctcaatgtcagctttctttgcccggatatgcgtcgtgaatttggaggctgtgccggcaacattgcgtacaatctgcatctgttgggtggtgctccgatcgtaatggctacggtgggccaagatttcggtccgtatcgcgagcacttcgaaactctgggcattgacttatcccgcgtcaagatcatcgatgatctgagtacaccgcaggccttcattaccaccgacatggatcaaaaccagattacggcgtttcacagcggcgcaatgatgcgttcgtacgaaaatcacgttcgtgatgtgccgggtgttaccttgggcctcgtaggtcctgatggacgcgagggcatgatccaaaatgccgaagaatttgctgctatgggcattccgttcatttttgacccaggtcaggcagtgcctctgttcaacggccccgaactgcgcgagtttatcgaacaggcggactatgtggtggtcaacgattacgaaagccgtcttcttcaagcgcgtactggctggaacgagcaggacattgcgtcacgcgtgcaggcgtatatcaccacgcaaggttcggctggagccgtggtacatacaccggagaagacctacgatattccggctgctaaaactcgtcgtgtcgttgatccaactggttgcggcgacgcgtttcgcgccggcctgatctatggtattcagcataattatgattggttgaccattggccgcatgggaaacttaatgggtgcgctgaaagtggaacaccctggcacccaaaatcagcgtttcgattttgccgatttcaacgaccagttcaaacaatattttggctacgcgctc

SEQ ID NO: 1554 - protein, 321 aa, synthetic construct
  REGION 1..321: note = variant of adenosine kinase from Xanthemonas campestris
MHHHHHHGGSGMSALICGSLAYDNIMVFPDQFKNHILPDRVHRLNVSFLCPDMRREFGGCAGNIAYNLHLLGGAPIVMATVGQDFGPYREHFETLGIDLSRVKIIDDLSTPQAFITTDMDQNQITAFHSGAMMRSYENHVRDVPGVTLGLVGPDGREGMIQNAEEFAAMGIPFIFDPGQAVPLFNGPELREFIEQADYVVVNDYESRLLQARTGWNEQDIASRVQAYITTQGSAGAVVHTPEKTYDIPAAKTRRVVDPTGCGDAFRAGLIYGIQHNYDWLTIGRMGNLMGALKVEHPGTQNQRFDFADFNDQFKQYFGYAL

SEQ ID NO: 1555 - DNA, 963 bp, synthetic construct
  misc_feature 1..963: note = variant of adenosine kinase from Xanthemonas campestris
  source 1..963: mol_type = other DNA
atgcatcatcaccatcaccatggggggtccggtatgagtgcactcatttgcggttctttagcgtatgataacatcatggtgtttccggaccagttcaagaaccatattctgcccgatcgtgttcaccgcctcaatgtcagctttatggtatttgacatgcgtcgtgaatttggaggctgtgccggcaacattgcgtacaatctgcatctgttgggtggtgctccgatcgtaatggctacggtgggccaagatttcggtccgtatcgcagccacttcgaaactctgggcattgacttatcccgcgtcaagatcatcgatgatctgagtacaccgcaggccttcattaccaccgacatggatcaaaaccagattacggcgtttcacagcggcgcaatgatgcgttcgtacgaaaatcacgttcgtgatgtgccgggtgttaccttgggcctcgtaggtcctgatggacgcgagggcatgatccaaaatgccgaagaatttgctgctatgggcattccgttcatttttgacccaggtcaggcagtgcctctgttcaacggccccgaactgcgcgaatttatcgaacaggcggactatgtggtggtcaacgattacgaaagccgtcttcttcaagcccgtactggctggaacgagcaggacattgtttcacgcgtgcaggcgtatatcaccacgcaaggttcggctggagccgtggtacatacaccggagaagacctacgatattccggctgctaaaactcgtcgtgtcgttgatccaactggttgcggcgacgcgtttcgcgccggcctgatctggggtattcagcataattatgattggttgaccattggccgcatgggaaacttaatgggtgcgctgaaagtggaacaccctggcacccaaaatcagcgtttcgattttgccgaattcaacgaccagttcaaacaatattttggctacgcgctc

SEQ ID NO: 1556 - protein, 321 aa, synthetic construct
  REGION 1..321: note = variant of adenosine kinase from Xanthemonas campestris
MHHHHHHGGSGMSALICGSLAYDNIMVFPDQFKNHILPDRVHRLNVSFMVFDMRREFGGCAGNIAYNLHLLGGAPIVMATVGQDFGPYRSHFETLGIDLSRVKIIDDLSTPQAFITTDMDQNQITAFHSGAMMRSYENHVRDVPGVTLGLVGPDGREGMIQNAEEFAAMGIPFIFDPGQAVPLFNGPELREFIEQADYVVVNDYESRLLQARTGWNEQDIVSRVQAYITTQGSAGAVVHTPEKTYDIPAAKTRRVVDPTGCGDAFRAGLIWGIQHNYDWLTIGRMGNLMGALKVEHPGTQNQRFDFAEFNDQFKQYFGYAL

SEQ ID NO: 1557 - DNA, 963 bp, synthetic construct
  misc_feature 1..963: note = variant of adenosine kinase from Xanthemonas campestris
  source 1..963: mol_type = other DNA
atgcatcatcaccatcaccatggggggtccggtatgagtgcactcatttgcggttctttagcgtatgataacatcatggtgtttccggaccagttcaagaaccatattctgcccgatatggttcaccgcctcaatgtcagctttcttgtgccgagcatgcgtcgtgaatttggaggctgtgccggcaacattgcgtacaatctgcatctgttgggtggtgctccgatcgtaatggctacggtgggccaagatttcggtccgtatcgcgagcacttcgaaactctgggcattgacttatcccgcgtcaagatcatcgatgatctgagtacaccgcaggccttcattaccaccgacatggatcaaaaccagattacggcgtttcacagcggcgcaatgatgcgttcgtacgaaaatcacgttcgtgatgtgccgggtgttaccttgggcctcgtaggtcctgatggacgcgagggcatgatccaaaatgccgaagaatttgctgctatgatgattccgttcatttttgacccaggtcaggcagtgcctctgttcaacggccccgaactgcgcgagtttatcgaacaggcggactatgtggtggtcaacgattacgaaagccgtcttcttcaatggcgtactggctggaacgagcaggacattgtttcacgcgtgcaggcgtatatcaccacgcaaggttcggctggagccgtggtacatacaccggagaagacctacgatattccggctgctaaaactcgtcgtgtcgttgatccaactggttgcggcgacgcgtttcgcgccggcctgatctatggtattcagcataattatgattggttgaccattggccgcatgggaaacttaatgggtgcgctgaaagtggaacaccctggcacccaaaatcagcgtttcgattttgccgaattcaacgaccagttcaaacaatattttggctacgcgctc

SEQ ID NO: 1558 - protein, 321 aa, synthetic construct
  REGION 1..321: note = variant of adenosine kinase from Xanthemonas campestris
MHHHHHHGGSGMSALICGSLAYDNIMVFPDQFKNHILPDMVHRLNVSFLVPSMRREFGGCAGNIAYNLHLLGGAPIVMATVGQDFGPYREHFETLGIDLSRVKIIDDLSTPQAFITTDMDQNQITAFHSGAMMRSYENHVRDVPGVTLGLVGPDGREGMIQNAEEFAAMMIPFIFDPGQAVPLFNGPELREFIEQADYVVVNDYESRLLQWRTGWNEQDIVSRVQAYITTQGSAGAVVHTPEKTYDIPAAKTRRVVDPTGCGDAFRAGLIYGIQHNYDWLTIGRMGNLMGALKVEHPGTQNQRFDFAEFNDQFKQYFGYAL

SEQ ID NO: 1559 - DNA, 963 bp, synthetic construct
  misc_feature 1..963: note = variant of adenosine kinase from Xanthemonas campestris
  source 1..963: mol_type = other DNA
atgcatcatcaccatcaccatggggggtccggtatgagtgcactcatttgcggttctttagcgtatgataacatcatggtgtttccggaccagttcaagaaccatattctgcccgatcgcgttcaccgcctcaatgtcagctttcttgtaccggacatgcgtcgtgaatttggaggctgtgccggcaacattgcgtacaatctgcatctgttgggtggtgctccgatcgtaatggctacggtgggccaagatttcggtccgtatcgcgagcacttcgaaactctgggcattgacttatcccgcgtcaagatcatcgatgatctgagtacaccgcaggccttcattaccaccgacatggatcaaaaccagattacggcgtttcacagcggcgcaatgatgcgttcgtacgaaaatcacgttcgtgatgtgccgggtgttaccttgggcctcgtaggtcctgatggacgcgagggcatgatccaaaatgccgaagaatttgctgctatgggcattccgttcatttttgacccaggtcaggcagtgcctctgttcaacggccatgaactgcgcgagtttatcgaacaggcggactatgtggtggtcaacgattacgaaagccgtcttcttcaagcccgtactggctggaacgagcaggacattgtgtcacgcgtgcaggcgtatatcaccacgcaaggttcggctggagccgtggtacatacaccggagaagacctacgatattccggctgctaaaactcgtcgtgtcgttgatccaactggttgcggcgacgcgtttcgcgccggcctgatctatggtattcagcataattatgattggttgaccattggccgcatgggaaacttaatgggtgcgctgaaagtggaacaccctggcacccaaaatcagcgtttcgattttgccgaattcaacgaccagttcaaacaatattttggctacgcgctc

SEQ ID NO: 1560 - protein, 321 aa, synthetic construct
  REGION 1..321: note = variant of adenosine kinase from Xanthemonas campestris
MHHHHHHGGSGMSALICGSLAYDNIMVFPDQFKNHILPDRVHRLNVSFLVPDMRREFGGCAGNIAYNLHLLGGAPIVMATVGQDFGPYREHFETLGIDLSRVKIIDDLSTPQAFITTDMDQNQITAFHSGAMMRSYENHVRDVPGVTLGLVGPDGREGMIQNAEEFAAMGIPFIFDPGQAVPLFNGHELREFIEQADYVVVNDYESRLLQARTGWNEQDIVSRVQAYITTQGSAGAVVHTPEKTYDIPAAKTRRVVDPTGCGDAFRAGLIYGIQHNYDWLTIGRMGNLMGALKVEHPGTQNQRFDFAEFNDQFKQYFGYAL

SEQ ID NO: 1561 - DNA, 963 bp, synthetic construct
  misc_feature 1..963: note = variant of adenosine kinase from Xanthemonas campestris
  source 1..963: mol_type = other DNA
atgcatcatcaccatcaccatggggggtccggtatgagtgcactcatttgcggttctttagcgtatgataacatcatggtgtttccggaccagttcaagaaccatattctgcccgatcgcgttcaccgcctcaatgtcagctttctttgcccggatatgcgtcgtgaatttggaggctgtgccggcaacattgcgtacaatctgcatctgttgggtggtgctccgatcgtaatggctacggtgggccaagatttcggtccgtatcgcgagcacttcgaaactctgggcattgacttatcccgcgtcaagatcatcgatgatctgagtacaccgcaggccttcattaccaccgacatggatcaaaaccagattacggcgtttcacagcggcgcaatgatgcgttcgtacgaaaatcacgttcgtgatgtgccgggtgttaccttgggcctcgtaggtcctgatggacgcgagggcatgatccaaaatgccgaagaatttgctgctatgggcattccgttcatttttgacccaggtcaggcagtgcctctgttcaacggccccgaactgcgcgagtttatcgaacaggcggactatgtggtggtcaacgattacgaaagccgtcttcttcaaaaacgtactggctggaacgagcaggacattgcgtcacgcgtgcaggcgtatatcaccacgcaaggttcggctggagccgtggtacatacaccggagaagacctacgatattccggctgctaaaactcgtcgtgtcgttgatccaactggttgcggcgacgcgtttcgcgccggcctgatctatggtattcagcataattatgattggttgaccattggccgcatgggaaacttaatgggtgcgctgaaagtggaacaccctggcacccaaaatcagcgtttcgattttgccgatttcaacgaccagttcaaacaatattttggctacgcgctc

SEQ ID NO: 1562 - protein, 321 aa, synthetic construct
  REGION 1..321: note = variant of adenosine kinase from Xanthemonas campestris
MHHHHHHGGSGMSALICGSLAYDNIMVFPDQFKNHILPDRVHRLNVSFLCPDMRREFGGCAGNIAYNLHLLGGAPIVMATVGQDFGPYREHFETLGIDLSRVKIIDDLSTPQAFITTDMDQNQITAFHSGAMMRSYENHVRDVPGVTLGLVGPDGREGMIQNAEEFAAMGIPFIFDPGQAVPLFNGPELREFIEQADYVVVNDYESRLLQKRTGWNEQDIASRVQAYITTQGSAGAVVHTPEKTYDIPAAKTRRVVDPTGCGDAFRAGLIYGIQHNYDWLTIGRMGNLMGALKVEHPGTQNQRFDFADFNDQFKQYFGYAL

SEQ ID NO: 1563 - DNA, 963 bp, synthetic construct
  misc_feature 1..963: note = variant of adenosine kinase from Xanthemonas campestris
  source 1..963: mol_type = other DNA
atgcatcatcaccatcaccatggggggtccggtatgagtgcactcatttgcggttctttagcgtatgataacatcatggtgtttccggaccagttcaagaaccatattctgcccgatatggttcaccgcctcaatgtcagctttctttgcccgagcatgcgtcgtgaatttggaggctgtgccggcaacattgcgtacaatctgcatctgttgggtggtgctccgatcgtaatggctacggtgggccaagatttcggtccgtatcgcgagcacttcgaaactctgggcattgacttatcccgcgtcaagatcatcgatgatctgagtacaccgcaggccttcattaccaccgacatggatcaaaaccagattacggcgtttcacagcggcgcaatgatgcgttcgtacgaaaatcacgttcgtgatgtgccgggtgttaccttgggcctcgtaggtcctgatggacgcgagggcatgatccaaaatgccgaagaatttgctgctatgggcattccgttcatttttgacccaggtcaggcagtgcctctgttcaacggccccgaactgcgcgagtttatcgaacaggcggactatgtggtggtcaacgattacgaaagccgtcttcttcaagcgcgtactggctggaacgagcaggacattgcgtcacgcgtgcaggcgtatatcaccacgcaaggttcggctggagccgtggtacatacaccggagaagacctacgatattccggctgctaaaactcgtcgtgtcgttgatccaactggttgcggcgacgcgtttcgcgccggcctgatctatggtattcagcataattatgattggttgaccattggccgcatgggaaacttaatgggtgcgctgaaagtggaacaccctggcacccaaaatcagcgtttcgattttgccgaattcaacgaccagttcaaacaatattttggctacgcgctc

SEQ ID NO: 1564 - protein, 321 aa, synthetic construct
  REGION 1..321: note = variant of adenosine kinase from Xanthemonas campestris
MHHHHHHGGSGMSALICGSLAYDNIMVFPDQFKNHILPDMVHRLNVSFLCPSMRREFGGCAGNIAYNLHLLGGAPIVMATVGQDFGPYREHFETLGIDLSRVKIIDDLSTPQAFITTDMDQNQITAFHSGAMMRSYENHVRDVPGVTLGLVGPDGREGMIQNAEEFAAMGIPFIFDPGQAVPLFNGPELREFIEQADYVVVNDYESRLLQARTGWNEQDIASRVQAYITTQGSAGAVVHTPEKTYDIPAAKTRRVVDPTGCGDAFRAGLIYGIQHNYDWLTIGRMGNLMGALKVEHPGTQNQRFDFAEFNDQFKQYFGYAL

SEQ ID NO: 1565 - DNA, 963 bp, synthetic construct
  misc_feature 1..963: note = variant of adenosine kinase from Xanthemonas campestris
  source 1..963: mol_type = other DNA
atgcatcatcaccatcaccatggggggtccggtatgagtgcactcatttgcggttctttagcgtatgataacatcatggtgtttccggaccagttcaagaaccatattctgcccgatcgtgttcaccgcctcaatgtcagctttctggtatttgacatgcgtcgtgaatttggaggctgtgccggcaacattgcgtacaatctgcatctgttgggtggtgctccgatcgtaatggctacggtgggccaagatttcggtccgtatcgcgaacacttcgaaactctgggcattgacttatcccgcgtcaagatcatcgatgatctgagtacaccgcaggccttcattaccaccgacatggatcaaaaccagattacggcgtttcacagcggcgcaatgatgcgttcgtacgaaaatcacgttcgtgatgtgccgggtgttaccttgggcctcgtaggtcctgatggacgcgagggcatgatccaaaatgccgaagaatttgctgctatgggcattccgttcatttttgacccaggtcaggcagtgcctctgttcaacggccccgaactgcgcgaatttatcgaacaggcggactatgtggtggtcaacgattacgaaagccgtcttcttcaagcccgtactggctggaacgagcaggacattgtttcacgcgtgcaggcgtatatcaccacgcaaggttcggctggagccgtggtacatacaccggagaagacctacgatattccggctgctaaaactcgtcgtgtcgttgatccaactggttgcggcgacgcgtttcgcgccggcctgatctatggtattcagcataattatgattggttgaccattggccgcatgggaaacttaatgggtgcgctgaaagtggaacaccctggcacccaaaatcagcgtttcgattttgccgaattcaacgaccagttcaaacaatatatgggctacgcgctc

SEQ ID NO: 1566 - protein, 321 aa, synthetic construct
  REGION 1..321: note = variant of adenosine kinase from Xanthemonas campestris
MHHHHHHGGSGMSALICGSLAYDNIMVFPDQFKNHILPDRVHRLNVSFLVFDMRREFGGCAGNIAYNLHLLGGAPIVMATVGQDFGPYREHFETLGIDLSRVKIIDDLSTPQAFITTDMDQNQITAFHSGAMMRSYENHVRDVPGVTLGLVGPDGREGMIQNAEEFAAMGIPFIFDPGQAVPLFNGPELREFIEQADYVVVNDYESRLLQARTGWNEQDIVSRVQAYITTQGSAGAVVHTPEKTYDIPAAKTRRVVDPTGCGDAFRAGLIYGIQHNYDWLTIGRMGNLMGALKVEHPGTQNQRFDFAEFNDQFKQYMGYAL

SEQ ID NO: 1567 - DNA, 963 bp, synthetic construct
  misc_feature 1..963: note = variant of adenosine kinase from Xanthemonas campestris
  source 1..963: mol_type = other DNA
atgcatcatcaccatcaccatggggggtccggtatgagtgcactcatttgcggttctttagcgtatgataacatcatggtgtttccggaccagttcaagaaccatattctgcccgatcgtgttcaccgcctcaatgtcagctttctggtatttgacatgcgtcgtgaatttggaggctgtgccggcaacattgcgtacaatctgcatctgttgggtggtgctccgatcgtaatggctacggtgggccaagatttcggtccgtatcgcgaacacttcgaaactctgggcattgacttatcccgcgtcaagatcatcgatgatctgagtacaccgcaggggttcattaccaccgacatggatcaaaaccagattacggcgtttcacagcggcgcaatgatgcgttcgtacgaaaatcacgttcgtgatgtgccgggtgttaccttgggcctcgtaggtcctgatggacgcgagggcatgatccaaaatgccgaagaatttgctgctatgggcattccgttcatttttgacccaggtcaggcagtgcctctgttcaacggccccgaactgcgcgaatttatcgaacaggcggactatgtggtggtcaacgattacgaaagccgtcttcttcaagcccgtactggctggaacgagcaggacattgtttcacgcgtgcaggcgtatatcaccacgcaaggttcggctggagccgtggtacatacaccggagaagacctacgatattccggctgctaaaactcgtcgtgtcgttgatccaactggttgcggcgacgcgtttcgcgccggcctgatctatggtattcagcataattatgattggttgaccattggccgcatgggaaacttaatgggtgcgctgaaagtggaacaccctggcacccaaaatcagcgtttcgattttgccgaattcaacgaccagttcaaacaatattttggctacgcgctc

SEQ ID NO: 1568 - protein, 321 aa, synthetic construct
  REGION 1..321: note = variant of adenosine kinase from Xanthemonas campestris
MHHHHHHGGSGMSALICGSLAYDNIMVFPDQFKNHILPDRVHRLNVSFLVFDMRREFGGCAGNIAYNLHLLGGAPIVMATVGQDFGPYREHFETLGIDLSRVKIIDDLSTPQGFITTDMDQNQITAFHSGAMMRSYENHVRDVPGVTLGLVGPDGREGMIQNAEEFAAMGIPFIFDPGQAVPLFNGPELREFIEQADYVVVNDYESRLLQARTGWNEQDIVSRVQAYITTQGSAGAVVHTPEKTYDIPAAKTRRVVDPTGCGDAFRAGLIYGIQHNYDWLTIGRMGNLMGALKVEHPGTQNQRFDFAEFNDQFKQYFGYAL

SEQ ID NO: 1569 - DNA, 963 bp, synthetic construct
  misc_feature 1..963: note = variant of adenosine kinase from Xanthemonas campestris
  source 1..963: mol_type = other DNA
atgcatcatcaccatcaccatggggggtccggtatgagtgcactcatttgcggttctttaggttatgataacatcatggtgtttccggaccagttcaagaaccatattctgcccgatcgtgttcaccgcctcaatgtcagctttctggtatttgacatgcgtcgtgaatttggaggctgtgccggcaacattgcgtacaatctgcatctgttgggtggtgctccgatcgtaatggctacggtgggccaagatttcggtccgtatcgcgaacacttcgaaactctgggcattgacttatcccgcgtcaagatcatcgatgatctgagtacaccgcaggccttcattaccaccgacatggatcaaaaccagattacggcgtttcacagcggcgcaatgatgcgttcgtacgaaaatcacgttcgtgatgtgccgggtgttaccttgggcctcgtaggtcctgatggacgcgagggcatgatccaaaatgccgaagaatttgctgctatgggcattccgttcatttttgacccaggtcaggcagtgcctctgttcaacggccccgaactgcgcgaatttatcgaacaggcggactatgtggtggtcaacgattacgaaagccgtcttcttcaagcccgtactggctggaacgagcaggacattgtttcacgcgtgcaggcgtatatcaccacgcaaggttcggctggagccgtggtacatacaccggagaagacctacgatattccggctgctaaaactcgtcgtgtcgttgatccaactggttgcggcgacgcgtttcgcgccggcctgatctatggtattcagcataattatgattggttgaccattggccgcatgggaaacttaatgggtgcgctgaaagtggaacaccctggcacccaaaatcagcgtttcgattttgccgaattcaacgaccagttcaaacaatattttggctacgcgctc

SEQ ID NO: 1570 - protein, 321 aa, synthetic construct
  REGION 1..321: note = variant of adenosine kinase from Xanthemonas campestris
MHHHHHHGGSGMSALICGSLGYDNIMVFPDQFKNHILPDRVHRLNVSFLVFDMRREFGGCAGNIAYNLHLLGGAPIVMATVGQDFGPYREHFETLGIDLSRVKIIDDLSTPQAFITTDMDQNQITAFHSGAMMRSYENHVRDVPGVTLGLVGPDGREGMIQNAEEFAAMGIPFIFDPGQAVPLFNGPELREFIEQADYVVVNDYESRLLQARTGWNEQDIVSRVQAYITTQGSAGAVVHTPEKTYDIPAAKTRRVVDPTGCGDAFRAGLIYGIQHNYDWLTIGRMGNLMGALKVEHPGTQNQRFDFAEFNDQFKQYFGYAL

SEQ ID NO: 1571 - DNA, 963 bp, synthetic construct
  misc_feature 1..963: note = variant of adenosine kinase from Xanthemonas campestris
  source 1..963: mol_type = other DNA
atgcatcatcaccatcaccatggggggtccggtatgagtgcactcatttgcggttctttagcgtatgataacatcatggtgtttccggaccagttcaagaaccatattctgcccgatcgtgttcaccgcctcaatgtcagctttctggtatttgacatgcgtcgtgaatttggaggctgtgccggcaacattgcgtacaatctgcatctgttgggtggtgctccgatcgtaatggctacggtgggccaagatttcggtccgtatcgcgaacacttcgaaactctgggcattgacttatcccgcgtcaagatcatcgatgatctgagtacaccgcaggccttcattaccaccgacatggatcaaaaccagattacggcgtttcacagcggcgcaatgatgcgttcgtacgaaaatcacgttcgtgatgtgccgggtgttaccttgggcctcgtaggtcctgatgtgcgcgagggcatgatccaaaatgccgaagaatttgctgctatgggcattccgttcatttttgacccaggtcaggcagtgcctctgttcaacggccccgaactgcgcgaatttatcgaacaggcggactatgtggtggtcaacgattacgaaagccgtcttcttcaagcccgtactggctggaacgagcaggacattgtttcacgcgtgcaggcgtatatcaccacgcaaggttcggctggagccgtggtacatacaccggagaagacctacgatattccggctgctaaaactcgtcgtgtcgttgatccaactggttgcggcgacgcgtttcgcgccggcctgatctatggtattcagcataattatgattggttgaccattggccgcatgggaaacttaatgggtgcgctgaaagtggaacaccctggcacccaaaatcagcgtttcgattttgccgaattcaacgaccagttcaaacaatattttggctacgcgctc

SEQ ID NO: 1572 - protein, 321 aa, synthetic construct
  REGION 1..321: note = variant of adenosine kinase from Xanthemonas campestris
MHHHHHHGGSGMSALICGSLAYDNIMVFPDQFKNHILPDRVHRLNVSFLVFDMRREFGGCAGNIAYNLHLLGGAPIVMATVGQDFGPYREHFETLGIDLSRVKIIDDLSTPQAFITTDMDQNQITAFHSGAMMRSYENHVRDVPGVTLGLVGPDVREGMIQNAEEFAAMGIPFIFDPGQAVPLFNGPELREFIEQADYVVVNDYESRLLQARTGWNEQDIVSRVQAYITTQGSAGAVVHTPEKTYDIPAAKTRRVVDPTGCGDAFRAGLIYGIQHNYDWLTIGRMGNLMGALKVEHPGTQNQRFDFAEFNDQFKQYFGYAL

SEQ ID NO: 1573 - DNA, 963 bp, synthetic construct
  misc_feature 1..963: note = variant of adenosine kinase from Xanthemonas campestris
  source 1..963: mol_type = other DNA
atgcatcatcaccatcaccatggggggtccggtatgagtgcactcatttgcggttctttagcgtatgataacatcatggtgtttccggaccagttcaagaaccatattctgcccgatcgtgttcaccgcctcaatgtcagctttctggtatttgacatgcgtcgtgaatttggaggctgtgccggcaacattgcgtacaatctgcatctgttgggtggtgctccgatcgtaatggctacggtgggccaagatttcggtccgtatcgcgaacacttcgaaactctgggcattgacttatcccgcgtcaagatcatcgatgatctgagtacaccgcaggccttcattaccaccgacatggatcaaaaccagattacgagttttcacagcggcgcaatgatgcgttcgtacgaaaatcacgttcgtgatgtgccgggtgttaccttgggcctcgtaggtcctgatggacgcgagggcatgatccaaaatgccgaagaatttgctgctatgggcattccgttcatttttgacccaggtcaggcagtgcctctgttcaacggccccgaactgcgcgaatttatcgaacaggcggactatgtggtggtcaacgattacgaaagccgtcttcttcaagcccgtactggctggaacgagcaggacattgtttcacgcgtgcaggcgtatatcaccacgcaaggttcggctggagccgtggtacatacaccggagaagacctacgatattccggctgctaaaactcgtcgtgtcgttgatccaactggttgcggcgacgcgtttcgcgccggcctgatctatggtattcagcataattatgattggttgaccattggccgcatgggaaacttaatgggtgcgctgaaagtggaacaccctggcacccaaaatcagcgtttcgattttgccgaattcaacgaccagttcaaacaatattttggctacgcgctc

SEQ ID NO: 1574 - protein, 321 aa, synthetic construct
  REGION 1..321: note = variant of adenosine kinase from Xanthemonas campestris
MHHHHHHGGSGMSALICGSLAYDNIMVFPDQFKNHILPDRVHRLNVSFLVFDMRREFGGCAGNIAYNLHLLGGAPIVMATVGQDFGPYREHFETLGIDLSRVKIIDDLSTPQAFITTDMDQNQITSFHSGAMMRSYENHVRDVPGVTLGLVGPDGREGMIQNAEEFAAMGIPFIFDPGQAVPLFNGPELREFIEQADYVVVNDYESRLLQARTGWNEQDIVSRVQAYITTQGSAGAVVHTPEKTYDIPAAKTRRVVDPTGCGDAFRAGLIYGIQHNYDWLTIGRMGNLMGALKVEHPGTQNQRFDFAEFNDQFKQYFGYAL

SEQ ID NO: 1575 - DNA, 963 bp, synthetic construct
  misc_feature 1..963: note = variant of adenosine kinase from Xanthemonas campestris
  source 1..963: mol_type = other DNA
atgcatcatcaccatcaccatggggggtccggtatgagtgcactcatttgcggttctttagcgtatgataacatcatggtgtttccggaccagttcaagaaccatattctgcccgatcgtgttcaccgcctcaatgtcagctttctggtatttgacatgcgtcgtgaatttggaggctgtgccggcaacattgcgtacaatctgcatctgttgggtggtgctccgatcgtaatggctacggtgggccaagatttcggtccgtatcgcgaacacttcgaaactctgggcattgacttatcccgcgtcaagatcatcgatgatctgagtacaccgcaggccttcattaccaccgacatggatcaaaaccagattacggcgtttcacagcggcgcaatgatgcgttcgtacgaaaatcacgttcgtgatgtgccgggtgttaccttgggcctcgtaggtcctgataatcgcgagggcatgatccaaaatgccgaagaatttgctgctatgggcattccgttcatttttgacccaggtcaggcagtgcctctgttcaacggccccgaactgcgcgaatttatcgaacaggcggactatgtggtggtcaacgattacgaaagccgtcttcttcaagcccgtactggctggaacgagcaggacattgtttcacgcgtgcaggcgtatatcaccacgcaaggttcggctggagccgtggtacatacaccggagaagacctacgatattccggctgctaaaactcgtcgtgtcgttgatccaactggttgcggcgacgcgtttcgcgccggcctgatctatggtattcagcataattatgattggttgaccattggccgcatgggaaacttaatgggtgcgctgaaagtggaacaccctggcacccaaaatcagcgtttcgattttgccgaattcaacgaccagttcaaacaatattttggctacgcgctc

SEQ ID NO: 1576 - protein, 321 aa, synthetic construct
  REGION 1..321: note = variant of adenosine kinase from Xanthemonas campestris
MHHHHHHGGSGMSALICGSLAYDNIMVFPDQFKNHILPDRVHRLNVSFLVFDMRREFGGCAGNIAYNLHLLGGAPIVMATVGQDFGPYREHFETLGIDLSRVKIIDDLSTPQAFITTDMDQNQITAFHSGAMMRSYENHVRDVPGVTLGLVGPDNREGMIQNAEEFAAMGIPFIFDPGQAVPLFNGPELREFIEQADYVVVNDYESRLLQARTGWNEQDIVSRVQAYITTQGSAGAVVHTPEKTYDIPAAKTRRVVDPTGCGDAFRAGLIYGIQHNYDWLTIGRMGNLMGALKVEHPGTQNQRFDFAEFNDQFKQYFGYAL

SEQ ID NO: 1577 - DNA, 963 bp, synthetic construct
  misc_feature 1..963: note = variant of adenosine kinase from Xanthemonas campestris
  source 1..963: mol_type = other DNA
atgcatcatcaccatcaccatggggggtccggtatgagtgcactcatttgcggttctttagcgtatgataacatcatggtgtttccggaccagttcaagaaccatattctgcccgatcgtgttcaccgcctcaatgtcagctttctggtatttgacatgcgtcgtgaatttggaggctgtgccggcaacattgcgtacaatctgcatctgttgggtggtgctccgatcgtaatggctacggtgggccaagatttcggtccgtatcgcgaacacttcgaaactctgggcattgacttatcccgcgtcaagatcatcgatgatctgagtacaccgcaggccttcattaccaccgacatggatcaaaaccagattacggcgtttcacagcggcgcaatgatgcgttcgtacgaaaatcacgttcgtgatgtgccgggtgttaccttgggcctcgtaggtcctgatggacgcgagggcatgatccaaaatgccgaagaatttgctgctatgggcattccgttcatttttgacccaggtcaggcagtgcctctgttcaacggccccgaactgcgcgaatttatcgaacaggcggactatgtggtggtcaacgattacgaaagccgtcttcttcaagcccgtactggctggaacgagcaggacattgtttcacgcgtgcaggcgtatatcaccacgatgggttcggctggagccgtggtacatacaccggagaagacctacgatattccggctgctaaaactcgtcgtgtcgttgatccaactggttgcggcgacgcgtttcgcgccggcctgatctatggtattcagcataattatgattggttgaccattggccgcatgggaaacttaatgggtgcgctgaaagtggaacaccctggcacccaaaatcagcgtttcgattttgccgaattcaacgaccagttcaaacaatattttggctacgcgctc

SEQ ID NO: 1578 - protein, 321 aa, synthetic construct
  REGION 1..321: note = variant of adenosine kinase from Xanthemonas campestris
MHHHHHHGGSGMSALICGSLAYDNIMVFPDQFKNHILPDRVHRLNVSFLVFDMRREFGGCAGNIAYNLHLLGGAPIVMATVGQDFGPYREHFETLGIDLSRVKIIDDLSTPQAFITTDMDQNQITAFHSGAMMRSYENHVRDVPGVTLGLVGPDGREGMIQNAEEFAAMGIPFIFDPGQAVPLFNGPELREFIEQADYVVVNDYESRLLQARTGWNEQDIVSRVQAYITTMGSAGAVVHTPEKTYDIPAAKTRRVVDPTGCGDAFRAGLIYGIQHNYDWLTIGRMGNLMGALKVEHPGTQNQRFDFAEFNDQFKQYFGYAL

SEQ ID NO: 1579 - DNA, 963 bp, synthetic construct
  misc_feature 1..963: note = variant of adenosine kinase from Xanthemonas campestris
  source 1..963: mol_type = other DNA
atgcatcatcaccatcaccatggggggtccggtatgagtgcactcatttgcggttctttagcgtatgataacatcatggtgtttccggaccagttcaagaaccatattctgcccgatcgtgttcaccgcctcaatgtcagctttctggtatttgacatgcgtcgtgaatttggaggctgtgccggcaacattgcgtacaatctgcatctgttgggtggtgctccgatcgtaatggctacggtgggccaagatttcggtccgtatcgcgaacacttcgaaactctgggcattgacttatcccgcgtcaagatcatcgatgatctgagtacaccgcaggggttcattaccaccgacatggatcaaaaccagattacggcgtttcacagcggcgcaatgatgcgttcgtacgaaaatcacgttcgtgatgtgccgggtgttaccttgggcctcgtaggtcctgatggacgcgagggcatgatccaaaatgccgaagaatttgctgctatgggcattccgttcatttttgacccaggtcaggcagtgcctctgttcaacggccccgaactgcgcgaatttatcgaacaggcggactatgtggtggtcaacgattacgaaagccgtcttcttcaagcccgtactggctggaacgagcaggacattgtttcacgcgtgcaggcgtatatcaccacgcaaggttcggctggagccgtggtacatacaccggagaagacctacgtgattccggctgctaaaactcgtcgtgtcgttgatccaactggttgcggcgacgcgtttcgcgccggcctgatctatggtattcagcataattatgattggttgaccattggccgcatgggaaacttaatgggtgcgctgaaagtggaacaccctggcacccaaaatcagcgtttcgattttgccgaattcaacgaccagttcaaacaatattttggctacgcgctc

SEQ ID NO: 1580 - protein, 321 aa, synthetic construct
  REGION 1..321: note = variant of adenosine kinase from Xanthemonas campestris
MHHHHHHGGSGMSALICGSLAYDNIMVFPDQFKNHILPDRVHRLNVSFLVFDMRREFGGCAGNIAYNLHLLGGAPIVMATVGQDFGPYREHFETLGIDLSRVKIIDDLSTPQGFITTDMDQNQITAFHSGAMMRSYENHVRDVPGVTLGLVGPDGREGMIQNAEEFAAMGIPFIFDPGQAVPLFNGPELREFIEQADYVVVNDYESRLLQARTGWNEQDIVSRVQAYITTQGSAGAVVHTPEKTYVIPAAKTRRVVDPTGCGDAFRAGLIYGIQHNYDWLTIGRMGNLMGALKVEHPGTQNQRFDFAEFNDQFKQYFGYAL

SEQ ID NO: 1581 - DNA, 963 bp, synthetic construct
  misc_feature 1..963: note = variant of adenosine kinase from Xanthemonas campestris
  source 1..963: mol_type = other DNA
atgcatcatcaccatcaccatggggggtccggtatgagtgcactcatttgcggttctttagcgtatgataacatcatggtgtttccggaccagttcaagaaccatattctgcccgatcgtgttcaccgcctcaatgtcagctttctggtatttgacatgcgtcgtgaatttggaggctgtgccggcaacattgcgtacaatctgcatctgttgggtggtcggccgatcgtaatggctacggtgggccaagatttcggtccgtatcgcgaacacttcgaaactctgggcattgacttatcccgcgtcaagatcatcgatgatctgagtacaccgcaggggttcattaccaccgacatggatcaaaaccagattacggcgtttcacagcggcgcaatgatgcgttcgtacgaaaatcacgttcgtgatgtgccgggtgttaccttgggcctcgtaggtcctgatggacgcgagggcatgatccaaaatgccgaagaatttgctgctatgggcattccgttcatttttgacccaggtcaggcagtgcctctgttcaacggccccgaactgcgcgaatttatcgaacaggcggactatgtggtggtcaacgattacgaaagccgtcttcttcaagcccgtactggctggaacgagcaggacattgtttcacgcgtgcaggcgtatatcaccacgcaaggttcggctggagccgtggtacatacaccggagaagacctacgatattccggctgctaaaactcgtcgtgtcgttgatccaactggttgcggcgacgcgtttcgcgccggcctgatctatggtattcagcataattatgattggttgaccattggccgcatgggaaacttaatgggtgcgctgaaagtggaacaccctggcacccaaaatcagcgtttcgattttgccgaattcaacgaccagttcaaacaatattttggctacgcgctc

SEQ ID NO: 1582 - protein, 321 aa, synthetic construct
  REGION 1..321: note = variant of adenosine kinase from Xanthemonas campestris
MHHHHHHGGSGMSALICGSLAYDNIMVFPDQFKNHILPDRVHRLNVSFLVFDMRREFGGCAGNIAYNLHLLGGRPIVMATVGQDFGPYREHFETLGIDLSRVKIIDDLSTPQGFITTDMDQNQITAFHSGAMMRSYENHVRDVPGVTLGLVGPDGREGMIQNAEEFAAMGIPFIFDPGQAVPLFNGPELREFIEQADYVVVNDYESRLLQARTGWNEQDIVSRVQAYITTQGSAGAVVHTPEKTYDIPAAKTRRVVDPTGCGDAFRAGLIYGIQHNYDWLTIGRMGNLMGALKVEHPGTQNQRFDFAEFNDQFKQYFGYAL

SEQ ID NO: 1583 - DNA, 963 bp, synthetic construct
  misc_feature 1..963: note = variant of adenosine kinase from Xanthemonas campestris
  source 1..963: mol_type = other DNA
atgcatcatcaccatcaccatggggggtccggtatgagtgcactcatttgcggttctttagcgtatgataacatcatggtgtttccggaccagttcaagaaccatattctgcccgatcgtgttcaccgcctcaatgtcagctttctggtatttgacatgcgtcgtgaatttggaggctgtgccggcaacattgcgtacaatctgcatctgttgggtggtgctccgatcgtaatggctacggtgggccaagatttcggtccgtatcgcgaacacttcgaaactctgggcattgacttatcccgcgtcaagatcatcgatgatctgagtacaccgcaggggttcattaccaccgacatggatcaaaaccagattacggcgtttcacagcggcgcaatgatgcgttcgtacgaaaatcacgttcgtgatgtgccgggtgttaccttgggcctcgtaggtcctgatggacgcgagggcatgatccaaaatgccgaagaatttgctgctatgggcattccgttcatttttgacccaggtcaggcagtgcctctgttcactggccccgaactgcgcgaatttatcgaacaggcggactatgtggtggtcaacgattacgaaagccgtcttcttcaagcccgtactggctggaacgagcaggacattgtttcacgcgtgcaggcgtatatcaccacgcaaggttcggctggagccgtggtacatacaccggagaagacctacgatattccggctgctaaaactcgtcgtgtcgttgatccaactggttgcggcgacgcgtttcgcgccggcctgatctatggtattcagcataattatgattggttgaccattggccgcatgggaaacttaatgggtgcgctgaaagtggaacaccctggcacccaaaatcagcgtttcgattttgccgaattcaacgaccagttcaaacaatattttggctacgcgctc

SEQ ID NO: 1584 - protein, 321 aa, synthetic construct
  REGION 1..321: note = variant of adenosine kinase from Xanthemonas campestris
MHHHHHHGGSGMSALICGSLAYDNIMVFPDQFKNHILPDRVHRLNVSFLVFDMRREFGGCAGNIAYNLHLLGGAPIVMATVGQDFGPYREHFETLGIDLSRVKIIDDLSTPQGFITTDMDQNQITAFHSGAMMRSYENHVRDVPGVTLGLVGPDGREGMIQNAEEFAAMGIPFIFDPGQAVPLFTGPELREFIEQADYVVVNDYESRLLQARTGWNEQDIVSRVQAYITTQGSAGAVVHTPEKTYDIPAAKTRRVVDPTGCGDAFRAGLIYGIQHNYDWLTIGRMGNLMGALKVEHPGTQNQRFDFAEFNDQFKQYFGYAL

SEQ ID NO: 1585 - DNA, 963 bp, synthetic construct
  misc_feature 1..963: note = variant of adenosine kinase from Xanthemonas campestris
  source 1..963: mol_type = other DNA
atgcatcatcaccatcaccatggggggtccggtatgagtgcactcatttgcggttctttagcgtatgataacatcatggtgtttccggaccagttcaagaaccatattctgcccgatcgtgttcaccgcctcaatgtcagctttctggtatttgacatgcgtcgtgaatttggaggctgtgccggcaacattgcgtacaatctgcatctgttgggtggtgctccgatcgtaatggctacggtgggccaagatttcggtccgtatcgcgaacacttcgaaactctgggcattgacttatcccgcgtcaagatcatcgatgatctgagtacaccgcaggggttcattaccaccgacatggatcaaaaccagattacggcgtttcacagcggcgcaatgatgcgttcgtacgaaaatcacgttcgtgatgtgccgggtgttaccttgggcctcgtaggtcctgatggacgcgagggcatgatccaaaatgccgaagaatttgctgctatgggcattccgttcatttttgacccaggtcaggcagtgcctctgttcaacggccccgaactgcgcgaatttatcgaacaggcggactatgtggtggtcaacgattacgaaagccgtcttcttcaagcccgtactggctggaacgagcaggacattgtttcacgcgtgcaggcgtatatcaccacgcaaggttcggctggagccgtggtacatacaccggagaagcggtacgatattccggctgctaaaactcgtcgtgtcgttgatccaactggttgcggcgacgcgtttcgcgccggcctgatctatggtattcagcataattatgattggttgaccattggccgcatgggaaacttaatgggtgcgctgaaagtggaacaccctggcacccaaaatcagcgtttcgattttgccgaattcaacgaccagttcaaacaatattttggctacgcgctc

SEQ ID NO: 1586 - protein, 321 aa, synthetic construct
  REGION 1..321: note = variant of adenosine kinase from Xanthemonas campestris
MHHHHHHGGSGMSALICGSLAYDNIMVFPDQFKNHILPDRVHRLNVSFLVFDMRREFGGCAGNIAYNLHLLGGAPIVMATVGQDFGPYREHFETLGIDLSRVKIIDDLSTPQGFITTDMDQNQITAFHSGAMMRSYENHVRDVPGVTLGLVGPDGREGMIQNAEEFAAMGIPFIFDPGQAVPLFNGPELREFIEQADYVVVNDYESRLLQARTGWNEQDIVSRVQAYITTQGSAGAVVHTPEKRYDIPAAKTRRVVDPTGCGDAFRAGLIYGIQHNYDWLTIGRMGNLMGALKVEHPGTQNQRFDFAEFNDQFKQYFGYAL

SEQ ID NO: 1587 - DNA, 963 bp, synthetic construct
  misc_feature 1..963: note = variant of adenosine kinase from Xanthemonas campestris
  source 1..963: mol_type = other DNA
atgcatcatcaccatcaccatggggggtccggtatgagtgcactcatttgcggttctttagcgtatgataacatcatggtgtttccggaccagttcaagaaccatattctgcccgatcgtgttcaccgcctcaatgtcagctttctggtatttgacatgcgtcgtgaatttggaggctgtgccggcaacattgcgtacaatctgcatctgttgggtggtgctccgatcgtaatggctacggtgggccaagatttcggtccgtatcgcgaacacttcgaaactctgggcattgacttatcccgcgtcaagatcatcgatgatctgagtacaccgcaggggttcattaccaccgacatggatcaaaaccagattacggcgtttcacagcggcgcaatgatgcgttcgtacgaaaatcacgttcgtgatgtgccgggtgttaccttgggcctcgtaggtcctgatggacgcgagggcatgatccaaaatgccgaagaatttgctgctatgggcattccgttcatttttgacccaggtcaggcagtgcctctgttcaacggccccgaactgcgcgaatttatcgaacaggcggactatgtggtggtcaacgattacgaaagccgtcttcttcaagcccgtactggctggaacgagcaggacattgtttcacgcgtgcaggcgtatatcaccacgcaaggttcggctggagccgtggtacatacaccggagaagacctaccggattccggctgctaaaactcgtcgtgtcgttgatccaactggttgcggcgacgcgtttcgcgccggcctgatctatggtattcagcataattatgattggttgaccattggccgcatgggaaacttaatgggtgcgctgaaagtggaacaccctggcacccaaaatcagcgtttcgattttgccgaattcaacgaccagttcaaacaatattttggctacgcgctc

SEQ ID NO: 1588 - protein, 321 aa, synthetic construct
  REGION 1..321: note = variant of adenosine kinase from Xanthemonas campestris
MHHHHHHGGSGMSALICGSLAYDNIMVFPDQFKNHILPDRVHRLNVSFLVFDMRREFGGCAGNIAYNLHLLGGAPIVMATVGQDFGPYREHFETLGIDLSRVKIIDDLSTPQGFITTDMDQNQITAFHSGAMMRSYENHVRDVPGVTLGLVGPDGREGMIQNAEEFAAMGIPFIFDPGQAVPLFNGPELREFIEQADYVVVNDYESRLLQARTGWNEQDIVSRVQAYITTQGSAGAVVHTPEKTYRIPAAKTRRVVDPTGCGDAFRAGLIYGIQHNYDWLTIGRMGNLMGALKVEHPGTQNQRFDFAEFNDQFKQYFGYAL

SEQ ID NO: 1589 - DNA, 963 bp, synthetic construct
  misc_feature 1..963: note = variant of adenosine kinase from Xanthemonas campestris
  source 1..963: mol_type = other DNA
atgcatcatcaccatcaccatggggggtccggtatgagtgcactcatttgcggttctttagcgtatgataacatcatggtgtttccggaccagttcaagaaccatattctgcccgatcgtgttcaccgcctcaatgtcagctttctggtatttgacatgcgtcgtgaatttggaggctgtgccggcaacattgcgtacaatctgcatctgttgggtggtgctccgatcgtaatggctacggtgggccaagatttcggtccgtatcgcgaacacttcgaaactctgggcattgacttatcccgcgtcaagatcatcgatgatctgagtacaccgcaggggttcattaccaccgacatggatcaaaaccagattacggcgtttcacagcggcgcaatgatgcgttcgtacgaaaatcacgttcgtgatgtgccgggtgttaccttgggcctcgtaggtcctgatggacgcgagggcatgatccaaaatgcctcggaatttgctgctatgggcattccgttcatttttgacccaggtcaggcagtgcctctgttcaacggccccgaactgcgcgaatttatcgaacaggcggactatgtggtggtcaacgattacgaaagccgtcttcttcaagcccgtactggctggaacgagcaggacattgtttcacgcgtgcaggcgtatatcaccacgcaaggttcggctggagccgtggtacatacaccggagaagacctacgatattccggctgctaaaactcgtcgtgtcgttgatccaactggttgcggcgacgcgtttcgcgccggcctgatctatggtattcagcataattatgattggttgaccattggccgcatgggaaacttaatgggtgcgctgaaagtggaacaccctggcacccaaaatcagcgtttcgattttgccgaattcaacgaccagttcaaacaatattttggctacgcgctc

SEQ ID NO: 1590 - protein, 321 aa, synthetic construct
  REGION 1..321: note = variant of adenosine kinase from Xanthemonas campestris
MHHHHHHGGSGMSALICGSLAYDNIMVFPDQFKNHILPDRVHRLNVSFLVFDMRREFGGCAGNIAYNLHLLGGAPIVMATVGQDFGPYREHFETLGIDLSRVKIIDDLSTPQGFITTDMDQNQITAFHSGAMMRSYENHVRDVPGVTLGLVGPDGREGMIQNASEFAAMGIPFIFDPGQAVPLFNGPELREFIEQADYVVVNDYESRLLQARTGWNEQDIVSRVQAYITTQGSAGAVVHTPEKTYDIPAAKTRRVVDPTGCGDAFRAGLIYGIQHNYDWLTIGRMGNLMGALKVEHPGTQNQRFDFAEFNDQFKQYFGYAL

SEQ ID NO: 1591 - DNA, 963 bp, synthetic construct
  misc_feature 1..963: note = variant of adenosine kinase from Xanthemonas campestris
  source 1..963: mol_type = other DNA
atgcatcatcaccatcaccatggggggtccggtatgagtgcactcatttgcggttctttagcgtatgataacatcatggtgtttccggaccagttcaagaaccatattctgcccgatcgtgttcaccgcctcaatgtcagctttctggtatttgacatgcgtcgtgaatttggaggctgtgccggcaacattgcgtacaatctgcatctgttgggtggtgctccgatcgtaatggctacggtgggccaagatttcggtccgtatcgcgaacacttcgaaactctgggcattgacttatcccgcgtcaagatcatcgatgatctgagtacaccgcaggggttcattaccaccgacatggatcaaaaccagattacggcgtttcacagcggcgcaatgatgcgttcgtacgaaaatcacgttcgtgatgtgccgggtgttaccttgggcctcgtaggtcctgatggacgcgagggcatgatccaaaatgccgaagaatttgctgctatgggcattccgttcatttttgacccaggtcaggcagtgcctctgttcaacggccccgaactgcgcgaatttatcgaacaggcggactatgtggtggtcaacgattacgaaagccgtcttcttcaagcccgtactggctggaacgagcaggacattgtttcacgcgtgcaggcgtatatcaccacgcaaggttcggctggagccgtggtacatacaccggagaagacctacgatattccggctgctaaaactcgtcgtgtcgttgatccaactggttgcggcgacgcgtttcgcgccggcctgatctatggtattcagcatggttatgattggttgaccattggccgcatgggaaacttaatgggtgcgctgaaagtggaacaccctggcacccaaaatcagcgtttcgattttgccgaattcaacgaccagttcaaacaatattttggctacgcgctc

SEQ ID NO: 1592 - protein, 321 aa, synthetic construct
  REGION 1..321: note = variant of adenosine kinase from Xanthemonas campestris
MHHHHHHGGSGMSALICGSLAYDNIMVFPDQFKNHILPDRVHRLNVSFLVFDMRREFGGCAGNIAYNLHLLGGAPIVMATVGQDFGPYREHFETLGIDLSRVKIIDDLSTPQGFITTDMDQNQITAFHSGAMMRSYENHVRDVPGVTLGLVGPDGREGMIQNAEEFAAMGIPFIFDPGQAVPLFNGPELREFIEQADYVVVNDYESRLLQARTGWNEQDIVSRVQAYITTQGSAGAVVHTPEKTYDIPAAKTRRVVDPTGCGDAFRAGLIYGIQHGYDWLTIGRMGNLMGALKVEHPGTQNQRFDFAEFNDQFKQYFGYAL

SEQ ID NO: 1593 - DNA, 963 bp, synthetic construct
  misc_feature 1..963: note = variant of adenosine kinase from Xanthemonas campestris
  source 1..963: mol_type = other DNA
atgcatcatcaccatcaccatggggggtccggtatgagtgcactcatttgcggttctttagcgtatgataacatcatggtgtttccggaccagttcaagaaccatattctgcccgatcgtgttcacgagctcaatgtcagctttctggtatttgacatgcgtcgtgaatttggaggctgtgccggcaacattgcgtacaatctgcatctgttgggtggtgctccgatcgtaatggctacggtgggccaagatttcggtccgtatcgcgaacacttcgaaactctgggcattgacttatcccgcgtcaagatcatcgatgatctgagtacaccgcaggggttcattaccaccgacatggatcaaaaccagattacggcgtttcacagcggcgcaatgatgcgttcgtacgaaaatcacgttcgtgatgtgccgggtgttaccttgggcctcgtaggtcctgatggacgcgagggcatgatccaaaatgccgaagaatttgctgctatgggcattccgttcatttttgacccaggtcaggcagtgcctctgttcaacggccccgaactgcgcgaatttatcgaacaggcggactatgtggtggtcaacgattacgaaagccgtcttcttcaagcccgtactggctggaacgagcaggacattgtttcacgcgtgcaggcgtatatcaccacgcaaggttcggctggagccgtggtacatacaccggagaagacctacgatattccggctgctaaaactcgtcgtgtcgttgatccaactggttgcggcgacgcgtttcgcgccggcctgatctatggtattcagcataattatgattggttgaccattggccgcatgggaaacttaatgggtgcgctgaaagtggaacaccctggcacccaaaatcagcgtttcgattttgccgaattcaacgaccagttcaaacaatattttggctacgcgctc

SEQ ID NO: 1594 - protein, 321 aa, synthetic construct
  REGION 1..321: note = variant of adenosine kinase from Xanthemonas campestris
MHHHHHHGGSGMSALICGSLAYDNIMVFPDQFKNHILPDRVHELNVSFLVFDMRREFGGCAGNIAYNLHLLGGAPIVMATVGQDFGPYREHFETLGIDLSRVKIIDDLSTPQGFITTDMDQNQITAFHSGAMMRSYENHVRDVPGVTLGLVGPDGREGMIQNAEEFAAMGIPFIFDPGQAVPLFNGPELREFIEQADYVVVNDYESRLLQARTGWNEQDIVSRVQAYITTQGSAGAVVHTPEKTYDIPAAKTRRVVDPTGCGDAFRAGLIYGIQHNYDWLTIGRMGNLMGALKVEHPGTQNQRFDFAEFNDQFKQYFGYAL

SEQ ID NO: 1595 - DNA, 963 bp, synthetic construct
  misc_feature 1..963: note = variant of adenosine kinase from Xanthemonas campestris
  source 1..963: mol_type = other DNA
atgcatcatcaccatcaccatggggggtccggtatgagtgcactcatttgcggttctttagcgtatgataacatcatggtgtttccggaccagttcaagaaccatattctgcccgatcgtgttcaccgcctcaatgtcagctttctggtatttgacatgcgtcgtgaatttggaggctgtgccggcaacattgcgtacaatctgcatctgttgggtggtgctccgatcgtaatggctacggtgggccaagatttcggtccgtatcgcgaacacttcgaaactctgggcattgacttatcccgcgtcaagatcatcgatgatctgagtacaccgcaggggttcattaccaccgacatggatcaaaaccagattacggcgtttcacagcggcgcaatgatgcgttcgtacgaaaatcacgttcgtgatgtgccgggtgttaccttgggcctcgtaggtcctgatggacgcgagggcatgatccaaaatgccgaagaatttgctgctatgggcattccgttcatttttgacccaggtcaggcagtgcctctgttcaacggccccgaactgcgcgaatttatcgaacaggcggactatgtggtggtcaacgattacgaaagccgtcttcttcaagcccgtactggctggaacgagcaggacattgtttcacgcgtgcaggcgtatatcaccacgcaaggttcggctggagccgtggtacatacaccggagaagacctacagtattccggctgctaaaactcgtcgtgtcgttgatccaactggttgcggcgacgcgtttcgcgccggcctgatctatggtattcagcataattatgattggttgaccattggccgcatgggaaacttaatgggtgcgctgaaagtggaacaccctggcacccaaaatcagcgtttcgattttgccgaattcaacgaccagttcaaacaatattttggctacgcgctc

SEQ ID NO: 1596 - protein, 321 aa, synthetic construct
  REGION 1..321: note = variant of adenosine kinase from Xanthemonas campestris
MHHHHHHGGSGMSALICGSLAYDNIMVFPDQFKNHILPDRVHRLNVSFLVFDMRREFGGCAGNIAYNLHLLGGAPIVMATVGQDFGPYREHFETLGIDLSRVKIIDDLSTPQGFITTDMDQNQITAFHSGAMMRSYENHVRDVPGVTLGLVGPDGREGMIQNAEEFAAMGIPFIFDPGQAVPLFNGPELREFIEQADYVVVNDYESRLLQARTGWNEQDIVSRVQAYITTQGSAGAVVHTPEKTYSIPAAKTRRVVDPTGCGDAFRAGLIYGIQHNYDWLTIGRMGNLMGALKVEHPGTQNQRFDFAEFNDQFKQYFGYAL

SEQ ID NO: 1597 - DNA, 963 bp, synthetic construct
  misc_feature 1..963: note = variant of adenosine kinase from Xanthemonas campestris
  source 1..963: mol_type = other DNA
atgcatcatcaccatcaccatggggggtccggtatgagtgcactcatttgcggttctttagcgtatgataacatcatggtgtttccggaccagttcaagaaccatattctgcccgatcgtgttcaccgcctcaatgtcagctttctggtatttgacatgcgtcgtgaatttggaggctgtgccggcaacattgcgtacaatctgcatctgttgggtggtgctccgatcgtaatggctacggtgggccaagatttcggtccgtatcgcgaacacttcgaaactctgggcattgacttatcccgcgtcaagatcatcgatgatctgagtacaccgcaggggttcattaccaccgacatggatcaaaaccagattacggcgtttcacagcggcgcaatgatgcgttcgtacgaaaatcacgttcgtgatgtgccgggtgttaccttgggcctcgtaggtcctgatggacgcgagggcatgatccaaaatggggaagaatttgctgctatgggcattccgttcatttttgacccaggtcaggcagtgcctctgttcaacggccccgaactgcgcgaatttatcgaacaggcggactatgtggtggtcaacgattacgaaagccgtcttcttcaagcccgtactggctggaacgagcaggacattgtttcacgcgtgcaggcgtatatcaccacgcaaggttcggctggagccgtggtacatacaccggagaagacctacgatattccggctgctaaaactcgtcgtgtcgttgatccaactggttgcggcgacgcgtttcgcgccggcctgatctatggtattcagcataattatgattggttgaccattggccgcatgggaaacttaatgggtgcgctgaaagtggaacaccctggcacccaaaatcagcgtttcgattttgccgaattcaacgaccagttcaaacaatattttggctacgcgctc

SEQ ID NO: 1598 - protein, 321 aa, synthetic construct
  REGION 1..321: note = variant of adenosine kinase from Xanthemonas campestris
MHHHHHHGGSGMSALICGSLAYDNIMVFPDQFKNHILPDRVHRLNVSFLVFDMRREFGGCAGNIAYNLHLLGGAPIVMATVGQDFGPYREHFETLGIDLSRVKIIDDLSTPQGFITTDMDQNQITAFHSGAMMRSYENHVRDVPGVTLGLVGPDGREGMIQNGEEFAAMGIPFIFDPGQAVPLFNGPELREFIEQADYVVVNDYESRLLQARTGWNEQDIVSRVQAYITTQGSAGAVVHTPEKTYDIPAAKTRRVVDPTGCGDAFRAGLIYGIQHNYDWLTIGRMGNLMGALKVEHPGTQNQRFDFAEFNDQFKQYFGYAL

SEQ ID NO: 1599 - DNA, 963 bp, synthetic construct
  misc_feature 1..963: note = variant of adenosine kinase from Xanthemonas campestris
  source 1..963: mol_type = other DNA
atgcatcatcaccatcaccatggggggtccggtatgagtgcactcatttgcggttctttagcgtatgataacatcatggtgtttccggaccagttcaagaaccatattctgcccgatcgtgttcaccgcctcaatgtcagctttctggtatttgacatgcgtcgtgaatttggaggctgtgccggcaacattgcgtacaatctgcatctgttgggtggtgctccgatcgtaatggctacggtgggccaagatttcggtccgtatcgcgaacacttcgaaactctgggcattgacttatcccgcgtcaagatcatcgatgatctgagtacaccgcaggggttcattaccaccgacatggatcaaaaccagattacggcgtttcacagcggcgcaatgatgcgttcgtacgaaaatcacgttcgtgatgtgccgggtgttaccttgggcctcgtaggtcctgatggacgcgagggcatgatccaaaatgccgaagaatttgctgctatgggcattccgttcatttttgacccaggtcaggcagtgcctctgttcaacggccccgaactgcgcgaatttatcgaacaggcggactatgtggtggtcaacgattacgaaagccgtcttcttcaagcccgtactggctggaacgcgcaggacattgtttcacgcgtgcaggcgtatatcaccacgcaaggttcggctggagccgtggtacatacaccggagaagacctacgatattccggctgctaaaactcgtcgtgtcgttgatccaactggttgcggcgacgcgtttcgcgccggcctgatctatggtattcagcataattatgattggttgaccattggccgcatgggaaacttaatgggtgcgctgaaagtggaacaccctggcacccaaaatcagcgtttcgattttgccgaattcaacgaccagttcaaacaatattttggctacgcgctc

SEQ ID NO: 1600 - protein, 321 aa, synthetic construct
  REGION 1..321: note = variant of adenosine kinase from Xanthemonas campestris
MHHHHHHGGSGMSALICGSLAYDNIMVFPDQFKNHILPDRVHRLNVSFLVFDMRREFGGCAGNIAYNLHLLGGAPIVMATVGQDFGPYREHFETLGIDLSRVKIIDDLSTPQGFITTDMDQNQITAFHSGAMMRSYENHVRDVPGVTLGLVGPDGREGMIQNAEEFAAMGIPFIFDPGQAVPLFNGPELREFIEQADYVVVNDYESRLLQARTGWNAQDIVSRVQAYITTQGSAGAVVHTPEKTYDIPAAKTRRVVDPTGCGDAFRAGLIYGIQHNYDWLTIGRMGNLMGALKVEHPGTQNQRFDFAEFNDQFKQYFGYAL

SEQ ID NO: 1601 - DNA, 963 bp, synthetic construct
  misc_feature 1..963: note = variant of adenosine kinase from Xanthemonas campestris
  source 1..963: mol_type = other DNA
atgcatcatcaccatcaccatggggggtccggtatgagtgcactcatttgcggttctttagcgtatgataacatcatggtgtttccggaccatttcaagaaccatattctgcccgatcgtgttcaccgcctcaatgtcagctttctggtatttgacatgcgtcgtgaatttggaggctgtgccggcaacattgcgtacaatctgcatctgttgggtggtgctccgatcgtaatggctacggtgggccaagatttcggtccgtatcgcgaacacttcgaaactctgggcattgacttatcccgcgtcaagatcatcgatgatctgagtacaccgcaggggttcattaccaccgacatggatcaaaaccagattacggcgtttcacagcggcgcaatgatgcgttcgtacgaaaatcacgttcgtgatgtgccgggtgttaccttgggcctcgtaggtcctgatggacgcgagggcatgatccaaaatgccgaagaatttgctgctatgggcattccgttcatttttgacccaggtcaggcagtgcctctgttcaacggccccgaactgcgcgaatttatcgaacaggcggactatgtggtggtcaacgattacgaaagccgtcttcttcaagcccgtactggctggaacgagcaggacattgtttcacgcgtgcaggcgtatatcaccacgcaaggttcggctggagccgtggtacatacaccggagaagacctacgatattccggctgctaaaactcgtcgtgtcgttgatccaactggttgcggcgacgcgtttcgcgccggcctgatctatggtattcagcataattatgattggttgaccattggccgcatgggaaacttaatgggtgcgctgaaagtggaacaccctggcacccaaaatcagcgtttcgattttgccgaattcaacgaccagttcaaacaatattttggctacgcgctc

SEQ ID NO: 1602 - protein, 321 aa, synthetic construct
  REGION 1..321: note = variant of adenosine kinase from Xanthemonas campestris
MHHHHHHGGSGMSALICGSLAYDNIMVFPDHFKNHILPDRVHRLNVSFLVFDMRREFGGCAGNIAYNLHLLGGAPIVMATVGQDFGPYREHFETLGIDLSRVKIIDDLSTPQGFITTDMDQNQITAFHSGAMMRSYENHVRDVPGVTLGLVGPDGREGMIQNAEEFAAMGIPFIFDPGQAVPLFNGPELREFIEQADYVVVNDYESRLLQARTGWNEQDIVSRVQAYITTQGSAGAVVHTPEKTYDIPAAKTRRVVDPTGCGDAFRAGLIYGIQHNYDWLTIGRMGNLMGALKVEHPGTQNQRFDFAEFNDQFKQYFGYAL

SEQ ID NO: 1603 - DNA, 963 bp, synthetic construct
  misc_feature 1..963: note = variant of adenosine kinase from Xanthemonas campestris
  source 1..963: mol_type = other DNA
atgcatcatcaccatcaccatggggggtccggtatgagtgcactcatttgcggttctttagcgtatgataacatcatggtgtttccggaccagttcaagaaccatattctgcccgatcgtgttcacgaactcaatgtcagctttctggtatttgacatgcgtcgtgaatttggaggctgtgccggcaacattgcgtacaatctgcatctgttgggtggtgctccgatcgtaatggctacggtgggccaagatttcggtccgtatcgcgaacacttcgaaactctgggcattgacttatcccgcgtcaagatcatcgatgatctgagtacaccgcaggggttcattaccaccgacatggatcaaaaccagattacggcgtttcacagcggcgcaatgatgcgttcgtacgaaaatcacgttcgtgatgtgccgggtgttaccttgggcctcgtaggtcctgatggacgcgagggcatgatccaaaatgccgaagaatttgctgctatgggcattccgttcatttttgacccaggtcaggcagtgcctctgttcaacggcccggaactgcgcgaatttatcgaacaggcggactatgtggtggtcaacgattacgaaagccgtcttcttcaagcccgtactggctggaacgagcaggacattgtttcacgcgtgcaggcgtatatcaccacgcaaggttcggctggagccgtggtacatacaccggagaagacctacgatattccggctgctaaaactcgtcgtgtcgttgatccaactggttgcggcgacgcgtttcgcgccggcctgatctatggtattcagcatgaatatgattggttgaccattggccgcatgggaaacttaatgggtgcgctgaaagtggaacaccctggcacccaaaatcagcgtttcgattttgccgaattcaacgaccagttcaaacaatattttggctacgcgctc

SEQ ID NO: 1604 - protein, 321 aa, synthetic construct
  REGION 1..321: note = variant of adenosine kinase from Xanthemonas campestris
MHHHHHHGGSGMSALICGSLAYDNIMVFPDQFKNHILPDRVHELNVSFLVFDMRREFGGCAGNIAYNLHLLGGAPIVMATVGQDFGPYREHFETLGIDLSRVKIIDDLSTPQGFITTDMDQNQITAFHSGAMMRSYENHVRDVPGVTLGLVGPDGREGMIQNAEEFAAMGIPFIFDPGQAVPLFNGPELREFIEQADYVVVNDYESRLLQARTGWNEQDIVSRVQAYITTQGSAGAVVHTPEKTYDIPAAKTRRVVDPTGCGDAFRAGLIYGIQHEYDWLTIGRMGNLMGALKVEHPGTQNQRFDFAEFNDQFKQYFGYAL

SEQ ID NO: 1605 - DNA, 963 bp, synthetic construct
  misc_feature 1..963: note = variant of adenosine kinase from Xanthemonas campestris
  source 1..963: mol_type = other DNA
atgcatcatcaccatcaccatggggggtccggtatgagtgcactcatttgcggttctttagcgtatgataacatcatggtgtttccggaccagttcaagaaccatattctgcccgatcgtgttcaccgcctcaatgtcagctttctggtatttgacatgcgtcgtgaatttggaggctgtgccggcaacattgcgtacaatctgcatctgttgggtggtgctccgatcgtaatggctacggtgggccaagatttcggtccgtatcgcgaacacttcgaaactctgggcattgacttatcccgcgtcaagatcatcgatgatctgagtacaccgcaggggttcattaccaccgacatggatcaaaaccagattacggcgtttcacagcggcgcaatgatgcgttcgtacgaaaatcacgttcgtgatgtgccgggtgttaccttgggcctcgtaggtcctgatggacgcgagggcatgatccaaaatgccgaagaatttgctgctatgggcattccgttcatttttgacccaggtcaggcagtgcctctgttcagcggctcggaactgcgcgaatttatcgaacaggcggactatgtggtggtcaacgattacgaaagccgtcttcttcaagcccgtactggctggaacgagcaggacattgtttcacgcgtgcaggcgtatatcaccacgcaaggttcggctggagccgtggtacatacaccggagaagacctacgatattccggctgctaaaactcgtcgtgtcgttgatccaactggttgcggcgacgcgtttcgcgccggcctgatctatggtattcagcatggatatgattggttgaccattggccgcatgggaaacttaatgggtgcgctgaaagtggaacaccctggcacccaaaatcagcgtttcgattttgccgaattcaacgaccagttcaaacaatattttggctacgcgctc

SEQ ID NO: 1606 - protein, 321 aa, synthetic construct
  REGION 1..321: note = variant of adenosine kinase from Xanthemonas campestris
MHHHHHHGGSGMSALICGSLAYDNIMVFPDQFKNHILPDRVHRLNVSFLVFDMRREFGGCAGNIAYNLHLLGGAPIVMATVGQDFGPYREHFETLGIDLSRVKIIDDLSTPQGFITTDMDQNQITAFHSGAMMRSYENHVRDVPGVTLGLVGPDGREGMIQNAEEFAAMGIPFIFDPGQAVPLFSGSELREFIEQADYVVVNDYESRLLQARTGWNEQDIVSRVQAYITTQGSAGAVVHTPEKTYDIPAAKTRRVVDPTGCGDAFRAGLIYGIQHGYDWLTIGRMGNLMGALKVEHPGTQNQRFDFAEFNDQFKQYFGYAL

SEQ ID NO: 1607 - DNA, 963 bp, synthetic construct
  misc_feature 1..963: note = variant of adenosine kinase from Xanthemonas campestris
  source 1..963: mol_type = other DNA
atgcatcatcaccatcaccatggggggtccggtatgagtgcactcatttgcggttctttagcgtatgataacatcatggtgtttccggaccagttcaagaaccatattctgcccgatcgtgttcacgaactcaatgtcagctttctggtatttgacatgcgtcgtgaatttggaggctgtgccggcaacattgcgtacaatctgcatctgttgggtggtgctccgatcgtaatggctacggtgggccaagatttcggtccgtatcgcgaacacttcgaaactctgggcattgacttatcccgcgtcaagatcatcgatgatctgagtacaccgcaggggttcattaccaccgacatggatcaaaaccagattacggcgtttcacagcggcgcaatgatgcgttcgtacgaaaatcacgttcgtgatgtgccgggtgttaccttgggcctcgtaggtcctgatggacgcgagggcatgatccaaaatgccgaagaatttgctgctatgggcattccgttcatttttgacccaggtcaggcagtgcctctgttcaacggctcggaactgcgcgaatttatcgaacaggcggactatgtggtggtcaacgattacgaaagccgtcttcttcaagcccgtactggctggaacgagcaggacattgttcagcgcgtgcaggcgtatatcaccacgcaaggttcggctggagccgtggtacatacaccggagaagacctacgatattccggctgctaaaactcgtcgtgtcgttgatccaactggttgcggcgacgcgtttcgcgccggcctgatctatggtattcagcatgattatgattggttgaccattggccgcatgggaaacttaatgggtgcgctgaaagtggaacaccctggcacccaaaatcagcgtttcgattttgccgaattcaacgaccagttcaaacaatattttggctacgcgctc

SEQ ID NO: 1608 - protein, 321 aa, synthetic construct
  REGION 1..321: note = variant of adenosine kinase from Xanthemonas campestris
MHHHHHHGGSGMSALICGSLAYDNIMVFPDQFKNHILPDRVHELNVSFLVFDMRREFGGCAGNIAYNLHLLGGAPIVMATVGQDFGPYREHFETLGIDLSRVKIIDDLSTPQGFITTDMDQNQITAFHSGAMMRSYENHVRDVPGVTLGLVGPDGREGMIQNAEEFAAMGIPFIFDPGQAVPLFNGSELREFIEQADYVVVNDYESRLLQARTGWNEQDIVQRVQAYITTQGSAGAVVHTPEKTYDIPAAKTRRVVDPTGCGDAFRAGLIYGIQHDYDWLTIGRMGNLMGALKVEHPGTQNQRFDFAEFNDQFKQYFGYAL

SEQ ID NO: 1609 - DNA, 963 bp, synthetic construct
  misc_feature 1..963: note = variant of adenosine kinase from Xanthemonas campestris
  source 1..963: mol_type = other DNA
atgcatcatcaccatcaccatggggggtccggtatgagtgcactcatttgcggttctttagcgtatgataacatcatggtgtttccggaccagttcaagaaccatattctgcccgatcgtgttcaccgcctcaatgtcagctttctggtatttgacatgcgtcgtgaatttggaggctgtgccggcaacattgcgtacaatctgcatctgttgggtggtgctccgatcgtaatggctacggtgggccaagatttcggtccgtatcgcgaacacttcgaaactctgggcattgacttatcccgcgtcaagatcatcgatgatctgagtacaccgcaggggttcattaccaccgacatggatcaaaaccagattacggcgtttcacagcggcgcaatgatgcgttcgtacgaaaatcacgttcgtgatgtgccgggtgttaccttgggcctcgtaggtcctgatggacgcgagggcatgatccaaaatgccgaagaatttgctgctatgggcattccgttcatttttgacccaggtcaggcagtgcctctgttcagcggctcggaactgcgcgaatttatcgaacaggcggactatgtggtggtcaacgattacgaaagccgtcttcttcaagcccgtactggctggaacgagcaggacattgttcagcgcgtgcaggcgtatatcaccacgcaaggttcggctggagccgtggtacatacaccggagaagacctacgatattccggctgctaaaactcgtcgtgtcgttgatccaactggttgcggcgacgcgtttcgcgccggcctgatctatggtattcagcatgattatgattggttgaccattggccgcatgggaaacttaatgggtgcgctgaaagtggaacaccctggcacccaaaatcagcgtttcgattttgccgaattcaacgaccagttcaaacaatattttggctacgcgctc

SEQ ID NO: 1610 - protein, 321 aa, synthetic construct
  REGION 1..321: note = variant of adenosine kinase from Xanthemonas campestris
MHHHHHHGGSGMSALICGSLAYDNIMVFPDQFKNHILPDRVHRLNVSFLVFDMRREFGGCAGNIAYNLHLLGGAPIVMATVGQDFGPYREHFETLGIDLSRVKIIDDLSTPQGFITTDMDQNQITAFHSGAMMRSYENHVRDVPGVTLGLVGPDGREGMIQNAEEFAAMGIPFIFDPGQAVPLFSGSELREFIEQADYVVVNDYESRLLQARTGWNEQDIVQRVQAYITTQGSAGAVVHTPEKTYDIPAAKTRRVVDPTGCGDAFRAGLIYGIQHDYDWLTIGRMGNLMGALKVEHPGTQNQRFDFAEFNDQFKQYFGYAL

SEQ ID NO: 1611 - DNA, 963 bp, synthetic construct
  misc_feature 1..963: note = variant of adenosine kinase from Xanthemonas campestris
  source 1..963: mol_type = other DNA
atgcatcatcaccatcaccatggggggtccggtatgagtgcactcatttgcggttctttagcgtatgataacatcatggtgtttccggaccagttcaagaaccatattctgcccgatcgtgttcaccgcctcaatgtcagctttctggtatttgacatgcgtcgtgaatttggaggctgtgccggcaacattgcgtacaatctgcatctgttgggtggtgctccgatcgtaatggctacggtgggccaagatttcggtccgtatcgcgaacacttcgaaactctgggcattgacttatcccgcgtcaagatcatcgatgatctgagtacaccgcaggggttcattaccaccgacatggatcaaaaccagattacggcgtttcacagcggcgcaatgatgcgttcgtacgaaaatcacgttcgtgatgtgccgggtgttaccttgggcctcgtaggtcctgatggacgcgagggcatgatccaaaatgccgaagaatttgctgctatgggcattccgttcatttttgacccaggtcaggcagtgcctctgttcaacggctcggaactgcgcgaatttatcgaacaggcggactatgtggtggtcaacgattacgaaagccgtcttcttcaagcccgtactggctggaacgagcaggacattgttagccgcgtgcaggcgtatatcaccacgcaaggttcggctggagccgtggtacatacaccggagaagacctacgatattccggctgctaaaactcgtcgtgtcgttgatccaactggttgcggcgacgcgtttcgcgccggcctgatctatggtattcagcatgaatatgattggttgaccattggccgcatgggaaacttaatgggtgcgctgaaagtggaacaccctggcacccaaaatcagcgtttcgattttgccgaattcaacgaccagttcaaacaatattttggctacgcgctc

SEQ ID NO: 1612 - protein, 321 aa, synthetic construct
  REGION 1..321: note = variant of adenosine kinase from Xanthemonas campestris
MHHHHHHGGSGMSALICGSLAYDNIMVFPDQFKNHILPDRVHRLNVSFLVFDMRREFGGCAGNIAYNLHLLGGAPIVMATVGQDFGPYREHFETLGIDLSRVKIIDDLSTPQGFITTDMDQNQITAFHSGAMMRSYENHVRDVPGVTLGLVGPDGREGMIQNAEEFAAMGIPFIFDPGQAVPLFNGSELREFIEQADYVVVNDYESRLLQARTGWNEQDIVSRVQAYITTQGSAGAVVHTPEKTYDIPAAKTRRVVDPTGCGDAFRAGLIYGIQHEYDWLTIGRMGNLMGALKVEHPGTQNQRFDFAEFNDQFKQYFGYAL

SEQ ID NO: 1613 - DNA, 963 bp, synthetic construct
  misc_feature 1..963: note = variant of adenosine kinase from Xanthemonas campestris
  source 1..963: mol_type = other DNA
atgcatcatcaccatcaccatggggggtccggtatgagtgcactcatttgcggttctttagcgtatgataacatcatggtgtttccggaccagttcaagaaccatattctgcccgatcgtgttcaccgcctcaatgtcagctttctggtatttgacatgcgtcgtgaatttggaggctgtgccggcaacattgcgtacaatctgcatctgttgggtggtgctccgatcgtaatggctacggtgggccaagatttcggtccgtatcgcgaacacttcgaaactctgggcattgacttatcccgcgtcaagatcatcgatgatctgagtacaccgcaggggttcattaccaccgacatggatcaaaaccagattacggcgtttcacagcggcgcaatgatgcgttcgtacgaaaatcacgttcgtgatgtgccgggtgttaccttgggcctcgtaggtcctgatggacgcgagggcatgatccaaaatgccgaagaatttgctgctatgggcattccgttcatttttgacccaggtcaggcagtgcctctgttcaacggctcggaactgcgcgaatttatcgaacaggcggactatgtggtggtcaacgattacgaaagccgtcttcttcaagcccgtactggctggaacgagcaggacattgttagccgcgtgcaggcgtatatcaccacgcaaggttcggctggagccgtggtacatacaccggagaagacctacgatattccggctgctaaaactcgtcgtgtcgttgatccaactggttgcggcgacgcgtttcgcgccggcctgatctatggtattcagcatgattatgattggttgaccattggccgcatgggaaacttaatgggtgcgctgaaagtggaacaccctggcacccaaaatcagcgtttcgattttgccgaattcaacgaccagttcaaacaatattttggctacgcgctc

SEQ ID NO: 1614 - protein, 321 aa, synthetic construct
  REGION 1..321: note = variant of adenosine kinase from Xanthemonas campestris
MHHHHHHGGSGMSALICGSLAYDNIMVFPDQFKNHILPDRVHRLNVSFLVFDMRREFGGCAGNIAYNLHLLGGAPIVMATVGQDFGPYREHFETLGIDLSRVKIIDDLSTPQGFITTDMDQNQITAFHSGAMMRSYENHVRDVPGVTLGLVGPDGREGMIQNAEEFAAMGIPFIFDPGQAVPLFNGSELREFIEQADYVVVNDYESRLLQARTGWNEQDIVSRVQAYITTQGSAGAVVHTPEKTYDIPAAKTRRVVDPTGCGDAFRAGLIYGIQHDYDWLTIGRMGNLMGALKVEHPGTQNQRFDFAEFNDQFKQYFGYAL

SEQ ID NO: 1615 - DNA, 963 bp, synthetic construct
  misc_feature 1..963: note = variant of adenosine kinase from Xanthemonas campestris
  source 1..963: mol_type = other DNA
atgcatcatcaccatcaccatggggggtccggtatgagtgcactcatttgcggttctttagcgtatgataacatcatggtgtttccggaccagttcaagaaccatattctgcccgatcgtgttcaccgcctcaatgtcagctttctggtatttgacatgcgtcgtgaatttggaggctgtgccggcaacattgcgtacaatctgcatctgttgggtggtgctccgatcgtaatggctacggtgggccaagatttcggtccgtatcgcgaacacttcgaaactctgggcattgacttatcccgcgtcaagatcatcgatgatctgagtacaccgcaggggttcattaccaccgacatggatcaaaaccagattacggcgtttcacagcggcgcaatgatgcgttcgtacgaaaatcacgttcgtgatgtgccgggtgttaccttgggcctcgtaggtcctgatggacgcgagggcatgatccaaaatgccgaagaatttgctgctatgggcattccgttcatttttgacccaggtcaggcagtgcctctgttcagcggcccggaactgcgcgaatttatcgaacaggcggactatgtggtggtcaacgattacgaaagccgtcttcttcaagcccgtactggctggaacgagcaggacattgttagccgcgtgcaggcgtatatcaccacgcaaggttcggctggagccgtggtacatacaccggagaagacctacgatattccggctgctaaaactcgtcgtgtcgttgatccaactggttgcggcgacgcgtttcgcgccggcctgatctatggtattcagcatgaatatgattggttgaccattggccgcatgggaaacttaatgggtgcgctgaaagtggaacaccctggcacccaaaatcagcgtttcgattttgccgaattcaacgaccagttcaaacaatattttggctacgcgctc

SEQ ID NO: 1616 - protein, 321 aa, synthetic construct
  REGION 1..321: note = variant of adenosine kinase from Xanthemonas campestris
MHHHHHHGGSGMSALICGSLAYDNIMVFPDQFKNHILPDRVHRLNVSFLVFDMRREFGGCAGNIAYNLHLLGGAPIVMATVGQDFGPYREHFETLGIDLSRVKIIDDLSTPQGFITTDMDQNQITAFHSGAMMRSYENHVRDVPGVTLGLVGPDGREGMIQNAEEFAAMGIPFIFDPGQAVPLFSGPELREFIEQADYVVVNDYESRLLQARTGWNEQDIVSRVQAYITTQGSAGAVVHTPEKTYDIPAAKTRRVVDPTGCGDAFRAGLIYGIQHEYDWLTIGRMGNLMGALKVEHPGTQNQRFDFAEFNDQFKQYFGYAL

SEQ ID NO: 1617 - DNA, 963 bp, synthetic construct
  misc_feature 1..963: note = variant of adenosine kinase from Xanthemonas campestris
  source 1..963: mol_type = other DNA
atgcatcatcaccatcaccatggggggtccggtatgagtgcactcatttgcggttctttagcgtatgataacatcatggtgtttccggaccagttcaagaaccatattctgcccgatcgtgttcaccgcctcaatgtcagctttctggtatttgacatgcgtcgtgaatttggaggctgtgccggcaacattgcgtacaatctgcatctgttgggtggtgctccgatcgtaatggctacggtgggccaagatttcggtccgtatcgcgaacacttcgaaactctgggcattgacttatcccgcgtcaagatcatcgatgatctgagtacaccgcaggggttcattaccaccgacatggatcaaaaccagattacggcgtttcacagcggcgcaatgatgcgttcgtacgaaaatcacgttcgtgatgtgccgggtgttaccttgggcctcgtaggtcctgatggacgcgagggcatgatccaaaatgccagcgaatttgctgctatgggcattccgttcatttttgacccaggtcaggcagtgcctctgttcaacggcccggaactgcgcgaatttatcgaacaggcggactatgtggtggtcaacgattacgaaagccgtcttcttcaagcccgtactggctggaacgagcaggacattgttcagcgcgtgcaggcgtatatcaccacgcaaggttcggctggagccgtggtacatacaccggagaagacctacgatattccggctgctaaaactcgtcgtgtcgttgatccaactggttgcggcgacgcgtttcgcgccggcctgatctatggtattcagcataattatgattggttgaccattggccgcatgggaaacttaatgggtgcgctgaaagtggaacaccctggcacccaaaatcagcgtttcgattttgccgaattcaacgaccagttcaaacaatattttggctacgcgctc

SEQ ID NO: 1618 - protein, 321 aa, synthetic construct
  REGION 1..321: note = variant of adenosine kinase from Xanthemonas campestris
MHHHHHHGGSGMSALICGSLAYDNIMVFPDQFKNHILPDRVHRLNVSFLVFDMRREFGGCAGNIAYNLHLLGGAPIVMATVGQDFGPYREHFETLGIDLSRVKIIDDLSTPQGFITTDMDQNQITAFHSGAMMRSYENHVRDVPGVTLGLVGPDGREGMIQNASEFAAMGIPFIFDPGQAVPLFNGPELREFIEQADYVVVNDYESRLLQARTGWNEQDIVQRVQAYITTQGSAGAVVHTPEKTYDIPAAKTRRVVDPTGCGDAFRAGLIYGIQHNYDWLTIGRMGNLMGALKVEHPGTQNQRFDFAEFNDQFKQYFGYAL

SEQ ID NO: 1619 - DNA, 963 bp, synthetic construct
  misc_feature 1..963: note = variant of adenosine kinase from Xanthemonas campestris
  source 1..963: mol_type = other DNA
atgcatcatcaccatcaccatggggggtccggtatgagtgcactcatttgcggttctttagcgtatgataacatcatggtgtttccggaccagttcaagaaccatattctgcccgatcgtgttcaccgcctcaatgtcagctttctggtatttgacatgcgtcgtgaatttggaggctgtgccggcaacattgcgtacaatctgcatctgttgggtggtgctccgatcgtaatggctacggtgggccaagatttcggtccgtatcgcgaacacttcgaaactctgggcattgacttatcccgcgtcaagatcatcgatgatctgagtacaccgcaggggttcattaccaccgacatggatcaaaaccagattacggcgtttcacagcggcgcaatgatgcgttcgtacgaaaatcacgttcgtgatgtgccgggtgttaccttgggcctcgtaggtcctgatggacgcgagggcatgatccaaaatgccagcgaatttgctgctatgggcattccgttcatttttgacccaggtcaggcagtgcctctgttcaacggctcggaactgcgcgaatttatcgaacaggcggactatgtggtggtcaacgattacgaaagccgtcttcttcaagcccgtactggctggaacgagcaggacattgttcagcgcgtgcaggcgtatatcaccacgcaaggttcggctggagccgtggtacatacaccggagaagacctacgatattccggctgctaaaactcgtcgtgtcgttgatccaactggttgcggcgacgcgtttcgcgccggcctgatctatggtattcagcatggatatgattggttgaccattggccgcatgggaaacttaatgggtgcgctgaaagtggaacaccctggcacccaaaatcagcgtttcgattttgccgaattcaacgaccagttcaaacaatattttggctacgcgctc

SEQ ID NO: 1620 - protein, 321 aa, synthetic construct
  REGION 1..321: note = variant of adenosine kinase from Xanthemonas campestris
MHHHHHHGGSGMSALICGSLAYDNIMVFPDQFKNHILPDRVHRLNVSFLVFDMRREFGGCAGNIAYNLHLLGGAPIVMATVGQDFGPYREHFETLGIDLSRVKIIDDLSTPQGFITTDMDQNQITAFHSGAMMRSYENHVRDVPGVTLGLVGPDGREGMIQNASEFAAMGIPFIFDPGQAVPLFNGSELREFIEQADYVVVNDYESRLLQARTGWNEQDIVQRVQAYITTQGSAGAVVHTPEKTYDIPAAKTRRVVDPTGCGDAFRAGLIYGIQHGYDWLTIGRMGNLMGALKVEHPGTQNQRFDFAEFNDQFKQYFGYAL

SEQ ID NO: 1621 - DNA, 963 bp, synthetic construct
  misc_feature 1..963: note = variant of adenosine kinase from Xanthemonas campestris
  source 1..963: mol_type = other DNA
atgcatcatcaccatcaccatggggggtccggtatgagtgcactcatttgcggttctttagcgtatgataacatcatggtgtttccggaccagttcaagaaccatattctgcccgatcgtgttcacgaactcaatgtcagctttctggtatttgacatgcgtcgtgaatttggaggctgtgccggcaacattgcgtacaatctgcatctgttgggtggtgctccgatcgtaatggctacggtgggccaagatttcggtccgtatcgcgaacacttcgaaactctgggcattgacttatcccgcgtcaagatcatcgatgatctgagtacaccgcaggggttcattaccaccgacatggatcaaaaccagattacggcgtttcacagcggcgcaatgatgcgttcgtacgaaaatcacgttcgtgatgtgccgggtgttaccttgggcctcgtaggtcctgatggacgcgagggcatgatccaaaatgccgaagaatttgctgctatgggcattccgttcatttttgacccaggtcaggcagtgcctctgttcaacggccccgaactgcgcgaatttatcgaacaggcggactatgtggtggtcaacgattacgaaagccgtcttcttcaagcccgtactggctggaacgagcaggacattgttcagcgcgtgcaggcgtatatcaccacgcaaggttcggctggagccgtggtacatacaccggagaagacctacgatattccggctgctaaaactcgtcgtgtcgttgatccaactggttgcggcgacgcgtttcgcgccggcctgatctatggtattcagcatggatatgattggttgaccattggccgcatgggaaacttaatgggtgcgctgaaagtggaacaccctggcacccaaaatcagcgtttcgattttgccgaattcaacgaccagttcaaacaatattttggctacgcgctc

SEQ ID NO: 1622 - protein, 321 aa, synthetic construct
  REGION 1..321: note = variant of adenosine kinase from Xanthemonas campestris
MHHHHHHGGSGMSALICGSLAYDNIMVFPDQFKNHILPDRVHELNVSFLVFDMRREFGGCAGNIAYNLHLLGGAPIVMATVGQDFGPYREHFETLGIDLSRVKIIDDLSTPQGFITTDMDQNQITAFHSGAMMRSYENHVRDVPGVTLGLVGPDGREGMIQNAEEFAAMGIPFIFDPGQAVPLFNGPELREFIEQADYVVVNDYESRLLQARTGWNEQDIVQRVQAYITTQGSAGAVVHTPEKTYDIPAAKTRRVVDPTGCGDAFRAGLIYGIQHGYDWLTIGRMGNLMGALKVEHPGTQNQRFDFAEFNDQFKQYFGYAL

SEQ ID NO: 1623 - DNA, 963 bp, synthetic construct
  misc_feature 1..963: note = variant of adenosine kinase from Xanthemonas campestris
  source 1..963: mol_type = other DNA
atgcatcatcaccatcaccatggggggtccggtatgagtgcactcatttgcggttctttagcgtatgataacatcatggtgtttccggaccagttcaagaaccatattctgcccgatcgtgttcaccgcctcaatgtcagctttctggtatttgacatgcgtcgtgaatttggaggctgtgccggcaacattgcgtacaatctgcatctgttgggtggtgctccgatcgtaatggctacggtgggccaagatttcggtccgtatcgcgaacacttcgaaactctgggcattgacttatcccgcgtcaagatcatcgatgatctgagtacaccgcaggggttcattaccaccgacatggatcaaaaccagattacggcgtttcacagcggcgcaatgatgcgttcgtacgaaaatcacgttcgtgatgtgccgggtgttaccttgggcctcgtaggtcctgatggacgcgagggcatgatccaaaatgccagcgaatttgctgctatgggcattccgttcatttttgacccaggtcaggcagtgcctctgttcaacggctcggaactgcgcgaatttatcgaacaggcggactatgtggtggtcaacgattacgaaagccgtcttcttcaagcccgtactggctggaacgagcaggacattgttcagcgcgtgcaggcgtatatcaccacgcaaggttcggctggagccgtggtacatacaccggagaagacctacgatattccggctgctaaaactcgtcgtgtcgttgatccaactggttgcggcgacgcgtttcgcgccggcctgatctatggtattcagcataattatgattggttgaccattggccgcatgggaaacttaatgggtgcgctgaaagtggaacaccctggcacccaaaatcagcgtttcgattttgccgaattcaacgaccagttcaaacaatattttggctacgcgctc

SEQ ID NO: 1624 - protein, 321 aa, synthetic construct
  REGION 1..321: note = variant of adenosine kinase from Xanthemonas campestris
MHHHHHHGGSGMSALICGSLAYDNIMVFPDQFKNHILPDRVHRLNVSFLVFDMRREFGGCAGNIAYNLHLLGGAPIVMATVGQDFGPYREHFETLGIDLSRVKIIDDLSTPQGFITTDMDQNQITAFHSGAMMRSYENHVRDVPGVTLGLVGPDGREGMIQNASEFAAMGIPFIFDPGQAVPLFNGSELREFIEQADYVVVNDYESRLLQARTGWNEQDIVQRVQAYITTQGSAGAVVHTPEKTYDIPAAKTRRVVDPTGCGDAFRAGLIYGIQHNYDWLTIGRMGNLMGALKVEHPGTQNQRFDFAEFNDQFKQYFGYAL

SEQ ID NO: 1625 - DNA, 963 bp, synthetic construct
  misc_feature 1..963: note = variant of adenosine kinase from Xanthemonas campestris
  source 1..963: mol_type = other DNA
atgcatcatcaccatcaccatggggggtccggtatgagtgcactcatttgcggttctttagcgtatgataacatcatggtgtttccggaccagttcaagaaccatattctgcccgatcgtgttcaccgcctcaatgtcagctttctggtatttgacatgcgtcgtgaatttggaggctgtgccggcaacattgcgtacaatctgcatctgttgggtggtgctccgatcgtaatggctacggtgggccaagatttcggtccgtatcgcgaacacttcgaaactctgggcattgacttatcccgcgtcaagatcatcgatgatctgagtacaccgcaggggttcattaccaccgacatggatcaaaaccagattacggcgtttcacagcggcgcaatgatgcgttcgtacgaaaatcacgttcgtgatgtgccgggtgttaccttgggcctcgtaggtcctgatggacgcgagggcatgatccaaaatgccgaagaatttgctgctatgggcattccgttcatttttgacccaggtcaggcagtgcctctgttcaacggccccgaactgcgcgaatttatcgaacaggcggactatgtggtggtcaacgattacgaaagccgtcttcttcaagcccgtactggctggaacgagcaggacattgttcagcgcgtgcaggcgtatatcaccacgcaaggttcggctggagccgtggtacatacaccggagaagacctacgatattccggctgctaaaactcgtcgtgtcgttgatccaactggttgcggcgacgcgtttcgcgccggcctgatctatggtattcagcataattatgattggttgaccattggccgcatgggaaacttaatgggtgcgctgaaagtggaacaccctggcacccaaaatcagcgtttcgattttgccgaattcaacgaccagttcaaacaatattttggctacgcgctc

SEQ ID NO: 1626 - protein, 321 aa, synthetic construct
  REGION 1..321: note = variant of adenosine kinase from Xanthemonas campestris
MHHHHHHGGSGMSALICGSLAYDNIMVFPDQFKNHILPDRVHRLNVSFLVFDMRREFGGCAGNIAYNLHLLGGAPIVMATVGQDFGPYREHFETLGIDLSRVKIIDDLSTPQGFITTDMDQNQITAFHSGAMMRSYENHVRDVPGVTLGLVGPDGREGMIQNAEEFAAMGIPFIFDPGQAVPLFNGPELREFIEQADYVVVNDYESRLLQARTGWNEQDIVQRVQAYITTQGSAGAVVHTPEKTYDIPAAKTRRVVDPTGCGDAFRAGLIYGIQHNYDWLTIGRMGNLMGALKVEHPGTQNQRFDFAEFNDQFKQYFGYAL

SEQ ID NO: 1627 - DNA, 963 bp, synthetic construct
  misc_feature 1..963: note = variant of adenosine kinase from Xanthemonas campestris
  source 1..963: mol_type = other DNA
atgcatcatcaccatcaccatggggggtccggtatgagtgcactcatttgcggttctttagcgtatgataacatcatggtgtttccggaccagttcaagaaccatattctgcccgatcgtgttcacgaactcaatgtcagctttctggtatttgacatgcgtcgtgaatttggaggctgtgccggcaacattgcgtacaatctgcatctgttgggtggtgctccgatcgtaatggctacggtgggccaagatttcggtccgtatcgcgaacacttcgaaactctgggcattgacttatcccgcgtcaagatcatcgatgatctgagtacaccgcaggggttcattaccaccgacatggatcaaaaccagattacggcgtttcacagcggcgcaatgatgcgttcgtacgaaaatcacgttcgtgatgtgccgggtgttaccttgggcctcgtaggtcctgatggacgcgagggcatgatccaaaatgccagcgaatttgctgctatgggcattccgttcatttttgacccaggtcaggcagtgcctctgttcagcggctcggaactgcgcgaatttatcgaacaggcggactatgtggtggtcaacgattacgaaagccgtcttcttcaagcccgtactggctggaacgagcaggacattgttcagcgcgtgcaggcgtatatcaccacgcaaggttcggctggagccgtggtacatacaccggagaagacctacgatattccggctgctaaaactcgtcgtgtcgttgatccaactggttgcggcgacgcgtttcgcgccggcctgatctatggtattcagcataattatgattggttgaccattggccgcatgggaaacttaatgggtgcgctgaaagtggaacaccctggcacccaaaatcagcgtttcgattttgccgaattcaacgaccagttcaaacaatattttggctacgcgctc

SEQ ID NO: 1628 - protein, 321 aa, synthetic construct
  REGION 1..321: note = variant of adenosine kinase from Xanthemonas campestris
MHHHHHHGGSGMSALICGSLAYDNIMVFPDQFKNHILPDRVHELNVSFLVFDMRREFGGCAGNIAYNLHLLGGAPIVMATVGQDFGPYREHFETLGIDLSRVKIIDDLSTPQGFITTDMDQNQITAFHSGAMMRSYENHVRDVPGVTLGLVGPDGREGMIQNASEFAAMGIPFIFDPGQAVPLFSGSELREFIEQADYVVVNDYESRLLQARTGWNEQDIVQRVQAYITTQGSAGAVVHTPEKTYDIPAAKTRRVVDPTGCGDAFRAGLIYGIQHNYDWLTIGRMGNLMGALKVEHPGTQNQRFDFAEFNDQFKQYFGYAL

SEQ ID NO: 1629 - DNA, 963 bp, synthetic construct
  misc_feature 1..963: note = variant of adenosine kinase from Xanthemonas campestris
  source 1..963: mol_type = other DNA
atgcatcatcaccatcaccatggggggtccggtatgagtgcactcatttgcggttctttagcgtatgataacatcatggtgtttccggaccagttcaagaaccatattctgcccgatcgtgttcaccgcctcaatgtcagctttctggtatttgacatgcgtcgtgaatttggaggctgtgccggcaacattgcgtacaatctgcatctgttgggtggtgctccgatcgtaatggctacggtgggccaagatttcggtccgtatcgcgaacacttcgaaactctgggcattgacttatcccgcgtcaagatcatcgatgatctgagtacaccgcaggggttcattaccaccgacatggatcaaaaccagattacggcgtttcacagcggcgcaatgatgcgttcgtacgaaaatcacgttcgtgatgtgccgggtgttaccttgggcctcgtaggtcctgatggacgcgagggcatgatccaaaatgccgaagaatttgctgctatgggcattccgttcatttttgacccaggtcaggcagtgcctctgttcaacggccccgaactgcgcgaatttatcgaacaggcggactatgtggtggtcaacgattacgaaagccgtcttcttcaagcccgtactggctggaacgagcaggacattgttcagcgcgtgcaggcgtatatcaccacgcaaggttcggctggagccgtggtacatacaccggagaagacctacgatattccggctgctaaaactcgtcgtgtcgttgatccaactggttgcggcgacgcgtttcgcgccggcctgatctatggtattcagcatggatatgattggttgaccattggccgcatgggaaacttaatgggtgcgctgaaagtggaacaccctggcacccaaaatcagcgtttcgattttgccgaattcaacgaccagttcaaacaatattttggctacgcgctc

SEQ ID NO: 1630 - protein, 321 aa, synthetic construct
  REGION 1..321: note = variant of adenosine kinase from Xanthemonas campestris
MHHHHHHGGSGMSALICGSLAYDNIMVFPDQFKNHILPDRVHRLNVSFLVFDMRREFGGCAGNIAYNLHLLGGAPIVMATVGQDFGPYREHFETLGIDLSRVKIIDDLSTPQGFITTDMDQNQITAFHSGAMMRSYENHVRDVPGVTLGLVGPDGREGMIQNAEEFAAMGIPFIFDPGQAVPLFNGPELREFIEQADYVVVNDYESRLLQARTGWNEQDIVQRVQAYITTQGSAGAVVHTPEKTYDIPAAKTRRVVDPTGCGDAFRAGLIYGIQHGYDWLTIGRMGNLMGALKVEHPGTQNQRFDFAEFNDQFKQYFGYAL

SEQ ID NO: 1631 - DNA, 963 bp, synthetic construct
  misc_feature 1..963: note = variant of adenosine kinase from Xanthemonas campestris
  source 1..963: mol_type = other DNA
atgcatcatcaccatcaccatggggggtccggtatgagtgcactcatttgcggttctttagcgtatgataacatcatggtgtttccggaccagttcaagaaccatattctgcccgatcgtgttcaccgcctcaatgtcagctttctggtatttgacatgcgtcgtgaatttggaggctgtgccggcaacattgcgtacaatctgcatctgttgggtggtgctccgatcgtaatggctacggtgggccaagatttcggtccgtatcgcgaacacttcgaaactctgggcattgacttatcccgcgtcaagatcatcgatgatctgagtacaccgcaggggttcattaccaccgacatggatcaaaaccagattacggcgtttcacagcggcgcaatgatgcgttcgtacgaaaatcacgttcgtgatgtgccgggtgttaccttgggcctcgtaggtcctgatggacgcgagggcatgatccaaaatgccgaagaatttgctgctatgggcattccgttcatttttgacccaggtcaggcagtgcctctgttcaacggccccgaactgcgcgaatttatcgaacaggcggactatgtggtggtcaacgattacgaaagccgtcttcttcaagcccgtactggctggaacgagcaggacattgttagccgcgtgcaggcgtatatcaccacgcaaggttcggctggagccgtggtacatacaccggagaagacctacgatattccggctgctaaaactcgtcgtgtcgttgatccaactggttgcggcgacgcgtttcgcgccggcctgatctatggtattcagcatgaatatgattggttgaccattggccgcatgggaaacttaatgggtgcgctgaaagtggaacaccctggcacccaaaatcagcgtttcgattttgccgaattcaacgaccagttcaaacaatattttggctacgcgctc

SEQ ID NO: 1632 - protein, 321 aa, synthetic construct
  REGION 1..321: note = variant of adenosine kinase from Xanthemonas campestris
MHHHHHHGGSGMSALICGSLAYDNIMVFPDQFKNHILPDRVHRLNVSFLVFDMRREFGGCAGNIAYNLHLLGGAPIVMATVGQDFGPYREHFETLGIDLSRVKIIDDLSTPQGFITTDMDQNQITAFHSGAMMRSYENHVRDVPGVTLGLVGPDGREGMIQNAEEFAAMGIPFIFDPGQAVPLFNGPELREFIEQADYVVVNDYESRLLQARTGWNEQDIVSRVQAYITTQGSAGAVVHTPEKTYDIPAAKTRRVVDPTGCGDAFRAGLIYGIQHEYDWLTIGRMGNLMGALKVEHPGTQNQRFDFAEFNDQFKQYFGYAL

SEQ ID NO: 1633 - DNA, 963 bp, synthetic construct
  misc_feature 1..963: note = variant of adenosine kinase from Xanthemonas campestris
  source 1..963: mol_type = other DNA
atgcatcatcaccatcaccatggggggtccggtatgagtgcactcatttgcggttctttagcgtatgataacatcatggtgtttccggaccagttcaagaaccatattctgcccgatcgtgttcaccgcctcaatgtcagctttctggtatttgacatgcgtcgtgaatttggaggctgtgccggcaacattgcgtacaatctgcatctgttgggtggtgctccgatcgtaatggctacggtgggccaagatttcggtccgtatcgcgaacacttcgaaactctgggcattgacttatcccgcgtcaagatcatcgatgatctgagtacaccgcaggggttcattaccaccgacatggatcaaaaccagattacggcgtttcacagcggcgcaatgatgcgttcgtacgaaaatcacgttcgtgatgtgccgggtgttaccttgggcctcgtaggtcctgatggacgcgagggcatgatccaaaatgccgaagaatttgctgctatgggcattccgttcatttttgacccaggtcaggcagtgcctctgttcaacggcccggaactgcgcgaatttatcgaacaggcggactatgtggtggtcaacgattacgaaagccgtcttcttcaagcccgtactggctggaacgagcaggacattgttagccgcgtgcaggcgtatatcaccacgcaaggttcggctggagccgtggtacatacaccggagaagacctacgatattccggctgctaaaactcgtcgtgtcgttgatccaactggttgcggcgacgcgtttcgcgccggcctgatctatggtattcagcatgattatgattggttgaccattggccgcatgggaaacttaatgggtgcgctgaaagtggaacaccctggcacccaaaatcagcgtttcgattttgccgaattcaacgaccagttcaaacaatattttggctacgcgctc

SEQ ID NO: 1634 - protein, 321 aa, synthetic construct
  REGION 1..321: note = variant of adenosine kinase from Xanthemonas campestris
MHHHHHHGGSGMSALICGSLAYDNIMVFPDQFKNHILPDRVHRLNVSFLVFDMRREFGGCAGNIAYNLHLLGGAPIVMATVGQDFGPYREHFETLGIDLSRVKIIDDLSTPQGFITTDMDQNQITAFHSGAMMRSYENHVRDVPGVTLGLVGPDGREGMIQNAEEFAAMGIPFIFDPGQAVPLFNGPELREFIEQADYVVVNDYESRLLQARTGWNEQDIVSRVQAYITTQGSAGAVVHTPEKTYDIPAAKTRRVVDPTGCGDAFRAGLIYGIQHDYDWLTIGRMGNLMGALKVEHPGTQNQRFDFAEFNDQFKQYFGYAL

SEQ ID NO: 1635 - DNA, 963 bp, synthetic construct
  misc_feature 1..963: note = variant of adenosine kinase from Xanthemonas campestris
  source 1..963: mol_type = other DNA
atgcatcatcaccatcaccatggggggtccggtatgagtgcactcatttgcggttctttagcgtatgataacatcatggtgtttccggacctgttcaagaaccatattctgcccgatcgtgttcaccgcctcaatgtcagctttctggtatttgacatgcgtcgtgaatttggaggctgtgccggcaacattgcgtacaatctgcatctgttgggtggtgctccgatcgtaatggctacggtgggccaagatttcggtccgtatcgcgaacacttcgaaactctgggcattgacttatcccgcgtcaagatcatcgatgatctgagtacaccgcaggggttcattaccaccgacatggatcaaaaccagattacggcgtttcacagcggcgcaatgatgcgttcgtacgaaaatcacgttcgtgatgtgccgggtgttaccttgggcctcgtaggtcctgatggacgcgagggcatgatccaaaatgccgaagaatttgctgctatgggcattccgttcatttttgacccaggtcaggcagtgcctctgttcaacggccccgaactgcgcgaatttatcgaacaggcggactatgtggtggtcaacgattacgaaagccgtcttcttcaagcccgtactggctggaacgagcaggacattgtttcacgcgtgcaggcgtatatcaccacgcaaggttcggctggagccgtggtacatacaccggagaagacctacgatattccggctgctaaaactcgtcgtgtcgttgatccaactggttgcggcgacgcgtttcgcgccggcctgatctatggtattcagcataattatgattggttgaccattggccgcatgggaaacttaatgggtgcgctgaaagtggaacaccctggcacccaaaatcagcgtttcgattttgccgaattcaacgaccagttcaaacaatattttggctacgcgctc

SEQ ID NO: 1636 - protein, 321 aa, synthetic construct
  REGION 1..321: note = variant of adenosine kinase from Xanthemonas campestris
MHHHHHHGGSGMSALICGSLAYDNIMVFPDLFKNHILPDRVHRLNVSFLVFDMRREFGGCAGNIAYNLHLLGGAPIVMATVGQDFGPYREHFETLGIDLSRVKIIDDLSTPQGFITTDMDQNQITAFHSGAMMRSYENHVRDVPGVTLGLVGPDGREGMIQNAEEFAAMGIPFIFDPGQAVPLFNGPELREFIEQADYVVVNDYESRLLQARTGWNEQDIVSRVQAYITTQGSAGAVVHTPEKTYDIPAAKTRRVVDPTGCGDAFRAGLIYGIQHNYDWLTIGRMGNLMGALKVEHPGTQNQRFDFAEFNDQFKQYFGYAL

SEQ ID NO: 1637 - DNA, 963 bp, synthetic construct
  misc_feature 1..963: note = variant of adenosine kinase from Xanthemonas campestris
  source 1..963: mol_type = other DNA
atgcatcatcaccatcaccatggggggtccggtatgagtgcactcatttgcggttctttagcgtatgataacatcatggtgtttccggactatttcaagaaccatattctgcccgatcgtgttcaccgcctcaatgtcagctttctggtatttgacatgcgtcgtgaatttggaggctgtgccggcaacattgcgtacaatctgcatctgttgggtggtgctccgatcgtaatggctacggtgggccaagatttcggtccgtatcgcgaacacttcgaaactctgggcattgacttatcccgcgtcaagatcatcgatgatctgagtacaccgcaggggttcattaccaccgacatggatcaaaaccagattacggcgtttcacagcggcgcaatgatgcgttcgtacgaaaatcacgttcgtgatgtgccgggtgttaccttgggcctcgtaggtcctgatggacgcgagggcatgatccaaaatgccgaagaatttgctgctatgggcattccgttcatttttgacccaggtcaggcagtgcctctgttcaacggccccgaactgcgcgaatttatcgaacaggcggactatgtggtggtcaacgattacgaaagccgtcttcttcaagcccgtactggctggaacgagcaggacattgtttcacgcgtgcaggcgtatatcaccacgcaaggttcggctggagccgtggtacatacaccggagaagacctacgatattccggctgctaaaactcgtcgtgtcgttgatccaactggttgcggcgacgcgtttcgcgccggcctgatctatggtattcagcataattatgattggttgaccattggccgcatgggaaacttaatgggtgcgctgaaagtggaacaccctggcacccaaaatcagcgtttcgattttgccgaattcaacgaccagttcaaacaatattttggctacgcgctc

SEQ ID NO: 1638 - protein, 321 aa, synthetic construct
  REGION 1..321: note = variant of adenosine kinase from Xanthemonas campestris
MHHHHHHGGSGMSALICGSLAYDNIMVFPDYFKNHILPDRVHRLNVSFLVFDMRREFGGCAGNIAYNLHLLGGAPIVMATVGQDFGPYREHFETLGIDLSRVKIIDDLSTPQGFITTDMDQNQITAFHSGAMMRSYENHVRDVPGVTLGLVGPDGREGMIQNAEEFAAMGIPFIFDPGQAVPLFNGPELREFIEQADYVVVNDYESRLLQARTGWNEQDIVSRVQAYITTQGSAGAVVHTPEKTYDIPAAKTRRVVDPTGCGDAFRAGLIYGIQHNYDWLTIGRMGNLMGALKVEHPGTQNQRFDFAEFNDQFKQYFGYAL

SEQ ID NO: 1639 - DNA, 963 bp, synthetic construct
  misc_feature 1..963: note = variant of adenosine kinase from Xanthemonas campestris
  source 1..963: mol_type = other DNA
atgcatcatcaccatcaccatggggggtccggtatgagtgcactcatttgcggttctttagcgtatgataacatcatggtgtttccggaccagttcaagaaccatattctgcccgatcgtgttcaccgcctcaatgtcagctttctggtatttgacatgcgtcgtgaatttggaggctgtgccggcaacattgcgtacaatctgcatctgttgggtggtgctccgatcgtaatggctacggtgggccaagatttcggtccgtatcgcgaacacttcgaaactctgggcattgacttatcccgcgtcaagatcatcgatgatctgagtacaccgcaggggttcattaccaccgacatggatcaaaaccagattacggcgtttcacagcggcgcaatgatgcgttcgtacgaaaatcacgttcgtgatgtgccgggtgttaccttgggcctcgtaggtcctgatggacgcgagggcatgatccaaaatgcccaggaatttgctgctatgggcattccgttcatttttgacccaggtcaggcagtgcctctgttcaacggccccgaactgcgcgaatttatcgaacaggcggactatgtggtggtcaacgattacgaaagccgtcttcttcaagcccgtactggctggaacgagcaggacattgtttcacgcgtgcaggcgtatatcaccacgcaaggttcggctggagccgtggtacatacaccggagaagacctacgatattccggctgctaaaactcgtcgtgtcgttgatccaactggttgcggcgacgcgtttcgcgccggcctgatctatggtattcagcataattatgattggttgaccattggccgcatgggaaacttaatgggtgcgctgaaagtggaacaccctggcacccaaaatcagcgtttcgattttgccgaattcaacgaccagttcaaacaatattttggctacgcgctc

SEQ ID NO: 1640 - protein, 321 aa, synthetic construct
  REGION 1..321: note = variant of adenosine kinase from Xanthemonas campestris
MHHHHHHGGSGMSALICGSLAYDNIMVFPDQFKNHILPDRVHRLNVSFLVFDMRREFGGCAGNIAYNLHLLGGAPIVMATVGQDFGPYREHFETLGIDLSRVKIIDDLSTPQGFITTDMDQNQITAFHSGAMMRSYENHVRDVPGVTLGLVGPDGREGMIQNAQEFAAMGIPFIFDPGQAVPLFNGPELREFIEQADYVVVNDYESRLLQARTGWNEQDIVSRVQAYITTQGSAGAVVHTPEKTYDIPAAKTRRVVDPTGCGDAFRAGLIYGIQHNYDWLTIGRMGNLMGALKVEHPGTQNQRFDFAEFNDQFKQYFGYAL

SEQ ID NO: 1641 - DNA, 963 bp, synthetic construct
  misc_feature 1..963: note = variant of adenosine kinase from Xanthemonas campestris
  source 1..963: mol_type = other DNA
atgcatcatcaccatcaccatggggggtccggtatgagtgcactcatttgcggttctttagcgtatgataacatcatggtgtttccggaccagttcaagaaccatattctgcccgatcgtgttcaccgcctcaatgtcagctttctggtatttgacatgcgtcgtgaatttggaggctgtgccggcaacattgcgtacaatctgcatctgttgggtggtgctccgatcgtaatggctacggtgggccaagatttcggtccgtatcgcgaacacttcgaaactctgggcattgacttatcccgcgtcaagatcatcgatgatctgagtacaccgcaggggttcattaccaccgacatggatcaaaaccagattacggcgtttcacagcggcgcaatgatgcgttcgtacgaaaatcacgttcgtgatgtgccgggtgttaccttgggcctcgtaggtcctgatggacgcgagggcatgatccaaaatgccgaagaatttgctgctatgggcattccgttcatttttgacccaggtcaggcagtgcctctgttcaacggccccgaactgcgcgaatttatcgaacaggcggactatgtggtggtcaacgattacgaaagccgtcttcttcaagcccgtactggctggaacgagcaggacattgtttcacgcgtgcaggcgtatatcaccacgcaaggttcggctggagccgtggtaatgacaccggagaagacctacgatattccggctgctaaaactcgtcgtgtcgttgatccaactggttgcggcgacgcgtttcgcgccggcctgatctatggtattcagcataattatgattggttgaccattggccgcatgggaaacttaatgggtgcgctgaaagtggaacaccctggcacccaaaatcagcgtttcgattttgccgaattcaacgaccagttcaaacaatattttggctacgcgctc

SEQ ID NO: 1642 - protein, 321 aa, synthetic construct
  REGION 1..321: note = variant of adenosine kinase from Xanthemonas campestris
MHHHHHHGGSGMSALICGSLAYDNIMVFPDQFKNHILPDRVHRLNVSFLVFDMRREFGGCAGNIAYNLHLLGGAPIVMATVGQDFGPYREHFETLGIDLSRVKIIDDLSTPQGFITTDMDQNQITAFHSGAMMRSYENHVRDVPGVTLGLVGPDGREGMIQNAEEFAAMGIPFIFDPGQAVPLFNGPELREFIEQADYVVVNDYESRLLQARTGWNEQDIVSRVQAYITTQGSAGAVVMTPEKTYDIPAAKTRRVVDPTGCGDAFRAGLIYGIQHNYDWLTIGRMGNLMGALKVEHPGTQNQRFDFAEFNDQFKQYFGYAL

SEQ ID NO: 1643 - DNA, 963 bp, synthetic construct
  misc_feature 1..963: note = variant of adenosine kinase from Xanthemonas campestris
  source 1..963: mol_type = other DNA
atgcatcatcaccatcaccatggggggtccggtatgagtgcactcatttgcggttctttagcgtatgataacatcatggtgtttccggaccagttcaagaaccatattctgcccgatcgtgttcaccgcctcaatgtcagctttctggtatttgaccttcgtcgtgaatttggaggctgtgccggcaacattgcgtacaatctgcatctgttgggtggtgctccgatcgtaatggctacggtgggccaagatttcggtccgtatcgcgaacacttcgaaactctgggcattgacttatcccgcgtcaagatcatcgatgatctgagtacaccgcaggggttcattaccaccgacatggatcaaaaccagattacggcgtttcacagcggcgcaatgatgcgttcgtacgaaaatcacgttcgtgatgtgccgggtgttaccttgggcctcgtaggtcctgatggacgcgagggcatgatccaaaatgccgaagaatttgctgctatgggcattccgttcatttttgacccaggtcaggcagtgcctctgttcaacggccccgaactgcgcgaatttatcgaacaggcggactatgtggtggtcaacgattacgaaagccgtcttcttcaagcccgtactggctggaacgagcaggacattgtttcacgcgtgcaggcgtatatcaccacgcaaggttcggctggagccgtggtacatacaccggagaagacctacgatattccggctgctaaaactcgtcgtgtcgttgatccaactggttgcggcgacgcgtttcgcgccggcctgatctatggtattcagcataattatgattggttgaccattggccgcatgggaaacttaatgggtgcgctgaaagtggaacaccctggcacccaaaatcagcgtttcgattttgccgaattcaacgaccagttcaaacaatattttggctacgcgctc

SEQ ID NO: 1644 - protein, 321 aa, synthetic construct
  REGION 1..321: note = variant of adenosine kinase from Xanthemonas campestris
MHHHHHHGGSGMSALICGSLAYDNIMVFPDQFKNHILPDRVHRLNVSFLVFDLRREFGGCAGNIAYNLHLLGGAPIVMATVGQDFGPYREHFETLGIDLSRVKIIDDLSTPQGFITTDMDQNQITAFHSGAMMRSYENHVRDVPGVTLGLVGPDGREGMIQNAEEFAAMGIPFIFDPGQAVPLFNGPELREFIEQADYVVVNDYESRLLQARTGWNEQDIVSRVQAYITTQGSAGAVVHTPEKTYDIPAAKTRRVVDPTGCGDAFRAGLIYGIQHNYDWLTIGRMGNLMGALKVEHPGTQNQRFDFAEFNDQFKQYFGYAL

SEQ ID NO: 1645 - DNA, 963 bp, synthetic construct
  misc_feature 1..963: note = variant of adenosine kinase from Xanthemonas campestris
  source 1..963: mol_type = other DNA
atgcatcatcaccatcaccatggggggtccggtatgagtgcactcatttgcggttctttagcgtatgataacatcatggtgtttccggaccagttcaagaaccatattctgcccgatcgtgttcaccgcctcaatgtcagctttctggtatttgacatgcgtcgtgaatttggaggctgtgccggcaacattgcgtacaatctgcatctgttgggtggtgctccgatcgtaatggctacggtgggccaagatttcggtccgtatcgcgaacacttcgaaactctgggcattgacttatcccgcgtcaagatcatcgatgatctgagtacaccgcaggggttcattaccaccgacatggatcaaaaccagattacggcgtttcacagcggcgcaatgatgcgttcgtacgaaaatcacgttcgtgatgtgccgggtgttaccttgggcctcgtaggtcctgatggacgcgagggcatgatccaaaatgccgaagaatttgctgctatgggcattccgttcatttttgacccaggtcaggcagtgcctctgttctcgggccccgaactgcgcgaatttatcgaacaggcggactatgtggtggtcaacgattacgaaagccgtcttcttcaagcccgtactggctggaacgagcaggacattgtttcacgcgtgcaggcgtatatcaccacgcaaggttcggctggagccgtggtacatacaccggagaagacctacgatattccggctgctaaaactcgtcgtgtcgttgatccaactggttgcggcgacgcgtttcgcgccggcctgatctatggtattcagcataattatgattggttgaccattggccgcatgggaaacttaatgggtgcgctgaaagtggaacaccctggcacccaaaatcagcgtttcgattttgccgaattcaacgaccagttcaaacaatattttggctacgcgctc

SEQ ID NO: 1646 - protein, 321 aa, synthetic construct
  REGION 1..321: note = variant of adenosine kinase from Xanthemonas campestris
MHHHHHHGGSGMSALICGSLAYDNIMVFPDQFKNHILPDRVHRLNVSFLVFDMRREFGGCAGNIAYNLHLLGGAPIVMATVGQDFGPYREHFETLGIDLSRVKIIDDLSTPQGFITTDMDQNQITAFHSGAMMRSYENHVRDVPGVTLGLVGPDGREGMIQNAEEFAAMGIPFIFDPGQAVPLFSGPELREFIEQADYVVVNDYESRLLQARTGWNEQDIVSRVQAYITTQGSAGAVVHTPEKTYDIPAAKTRRVVDPTGCGDAFRAGLIYGIQHNYDWLTIGRMGNLMGALKVEHPGTQNQRFDFAEFNDQFKQYFGYAL

SEQ ID NO: 1647 - DNA, 963 bp, synthetic construct
  misc_feature 1..963: note = variant of adenosine kinase from Xanthemonas campestris
  source 1..963: mol_type = other DNA
atgcatcatcaccatcaccatggggggtccggtatgagtgcactcatttgcggttctttagcgtatgataacatcatggtgtttccggaccagttcaagaaccatattctgcccgatcgtgttcaccgcctcaatgtcagctttctggtatttgacatgcgtcgtgaatttggaggctgtgccggcaacattgcgtacaatctgcatctgttgggtggtgctccgatcgtaatggctacggtgggccaagatttcggtccgtatcgcgaacacttcgaaactctgggcattgacttatcccgcgtcaagatcatcgatgatctgagtacaccgcaggggttcattaccaccgacatggatcaaaaccagattacggcgtttcacagcggcgcaatgatgcgttcgtacgaaaatcacgttcgtgatgtgccgggtgttaccttgggcctcgtaggtcctgatggacgcgagggcatgatccaaaatgccgcggaatttgctgctatgggcattccgttcatttttgacccaggtcaggcagtgcctctgttcaacggccccgaactgcgcgaatttatcgaacaggcggactatgtggtggtcaacgattacgaaagccgtcttcttcaagcccgtactggctggaacgagcaggacattgtttcacgcgtgcaggcgtatatcaccacgcaaggttcggctggagccgtggtacatacaccggagaagacctacgatattccggctgctaaaactcgtcgtgtcgttgatccaactggttgcggcgacgcgtttcgcgccggcctgatctatggtattcagcataattatgattggttgaccattggccgcatgggaaacttaatgggtgcgctgaaagtggaacaccctggcacccaaaatcagcgtttcgattttgccgaattcaacgaccagttcaaacaatattttggctacgcgctc

SEQ ID NO: 1648 - protein, 321 aa, synthetic construct
  REGION 1..321: note = variant of adenosine kinase from Xanthemonas campestris
MHHHHHHGGSGMSALICGSLAYDNIMVFPDQFKNHILPDRVHRLNVSFLVFDMRREFGGCAGNIAYNLHLLGGAPIVMATVGQDFGPYREHFETLGIDLSRVKIIDDLSTPQGFITTDMDQNQITAFHSGAMMRSYENHVRDVPGVTLGLVGPDGREGMIQNAAEFAAMGIPFIFDPGQAVPLFNGPELREFIEQADYVVVNDYESRLLQARTGWNEQDIVSRVQAYITTQGSAGAVVHTPEKTYDIPAAKTRRVVDPTGCGDAFRAGLIYGIQHNYDWLTIGRMGNLMGALKVEHPGTQNQRFDFAEFNDQFKQYFGYAL

SEQ ID NO: 1649 - DNA, 963 bp, synthetic construct
  misc_feature 1..963: note = variant of adenosine kinase from Xanthemonas campestris
  source 1..963: mol_type = other DNA
atgcatcatcaccatcaccatggggggtccggtatgagtgcactcatttgcggttctttagcgtatgataacatcatggtgtttccggaccagttcaagaaccatattctgcccgatcgtgttcaccgcctcaatgtcagctttctggtatttgacatgcgtcgtgaatttggaggctgtgccggcaacattgcgtacaatctgcatctgttgggtggtaccccgatcgtaatggctacggtgggccaagatttcggtccgtatcgcgaacacttcgaaactctgggcattgacttatcccgcgtcaagatcatcgatgatctgagtacaccgcaggggttcattaccaccgacatggatcaaaaccagattacggcgtttcacagcggcgcaatgatgcgttcgtacgaaaatcacgttcgtgatgtgccgggtgttaccttgggcctcgtaggtcctgatggacgcgagggcatgatccaaaatgccgaagaatttgctgctatgggcattccgttcatttttgacccaggtcaggcagtgcctctgttcagcggcccggaactgcgcgaatttatcgaacaggcggactatgtggtggtcaacgattacgaaagccgccttcttcaagcccgtactggctggaacgagcaggacattgttagccgcgtgcaggcgtatatcaccacgcaaggttcggctggagccgtggtaatgacaccggagaagcgctacgttattccggctgctaaaactcgtcgtgtcgttgatccaactggttgcggcgacgcgtttcgcgccggcctgatctatggtattcagcatgaatatgattggttgaccattggccgcatgggaaacttaatgggtgcgctgaaagtggaacaccctggcacccaaaatcagcgtttcgattttgccgaattcaacgaccagttcaaacaatattttggctacgcgctc

SEQ ID NO: 1650 - protein, 321 aa, synthetic construct
  REGION 1..321: note = variant of adenosine kinase from Xanthemonas campestris
MHHHHHHGGSGMSALICGSLAYDNIMVFPDQFKNHILPDRVHRLNVSFLVFDMRREFGGCAGNIAYNLHLLGGTPIVMATVGQDFGPYREHFETLGIDLSRVKIIDDLSTPQGFITTDMDQNQITAFHSGAMMRSYENHVRDVPGVTLGLVGPDGREGMIQNAEEFAAMGIPFIFDPGQAVPLFSGPELREFIEQADYVVVNDYESRLLQARTGWNEQDIVSRVQAYITTQGSAGAVVMTPEKRYVIPAAKTRRVVDPTGCGDAFRAGLIYGIQHEYDWLTIGRMGNLMGALKVEHPGTQNQRFDFAEFNDQFKQYFGYAL

SEQ ID NO: 1651 - DNA, 963 bp, synthetic construct
  misc_feature 1..963: note = variant of adenosine kinase from Xanthemonas campestris
  source 1..963: mol_type = other DNA
atgcatcatcaccatcaccatggggggtccggtatgagtgcactcatttgcggttctttagcgtatgataacatcatggtgtttccggactatttcaagaaccatattctgcccgatcgtgttcaccgcctcaatgtcagctttctggtatttgacatgcgtcgtgaatttggaggctgtgccggcaacattgcgtacaatctgcatctgttgggtggtcgcccgatcgtaatggctacggtgggccaagatttcggtccgtatcgcgaacacttcgaaactctgggcattgacttatcccgcgtcaagatcatcgatgatctgagtacaccgcaggggttcattaccaccgacatggatcaaaaccagattacggcgtttcacagcggcgcaatgatgcgttcgtacgaaaatcacgttcgtgatgtgccgggtgttaccttgggcctcgtaggtcctgatggacgcgagggcatgatccaaaatgccgaagaatttgctgctatgggcattccgttcatttttgacccaggtcaggcagtgcctctgttcagcggcccggaactgcgcgaatttatcgaacaggcggactatgtggtggtcaacgattacgaaagcatgcttcttcaagcccgtactggctggaacgagcaggacattgttagccgcgtgcaggcgtatatcaccacgcaaggttcggctggagccgtggtaatgacaccggagaagcgctacgttattccggctgctaaaactcgtcgtgtcgttgatccaactggttgcggcgacgcgtttcgcgccggcctgatctatggtattcagcatgaatatgattggttgaccattggccgcatgggaaacttaatgggtgcgctgaaagtggaacaccctggcacccaaaatcagcgtttcgattttgccgaattcaacgaccagttcaaacaatattttggctacgcgctc

SEQ ID NO: 1652 - protein, 321 aa, synthetic construct
  REGION 1..321: note = variant of adenosine kinase from Xanthemonas campestris
MHHHHHHGGSGMSALICGSLAYDNIMVFPDYFKNHILPDRVHRLNVSFLVFDMRREFGGCAGNIAYNLHLLGGRPIVMATVGQDFGPYREHFETLGIDLSRVKIIDDLSTPQGFITTDMDQNQITAFHSGAMMRSYENHVRDVPGVTLGLVGPDGREGMIQNAEEFAAMGIPFIFDPGQAVPLFSGPELREFIEQADYVVVNDYESMLLQARTGWNEQDIVSRVQAYITTQGSAGAVVMTPEKRYVIPAAKTRRVVDPTGCGDAFRAGLIYGIQHEYDWLTIGRMGNLMGALKVEHPGTQNQRFDFAEFNDQFKQYFGYAL

SEQ ID NO: 1653 - DNA, 963 bp, synthetic construct
  misc_feature 1..963: note = variant of adenosine kinase from Xanthemonas campestris
  source 1..963: mol_type = other DNA
atgcatcatcaccatcaccatggggggtccggtatgagtgcactcatttgcggttctttagcgtatgataacatcatggtgtttccggactatttcaagaaccatattctgcccgatcgtgttcaccgcctcaatgtcagctttctggtatttgacatgcgtcgtgaatttggaggctgtgccggcaacattgcgtacaatctgcatctgttgggtggtgccccgatcgtaatggctacggtgggccaagatttcggtccgtatcgcgaacacttcgaaactctgggcattgacttatcccgcgtcaagatcatcgatgatctgagtacaccgcaggggttcattaccaccgacatggatcaaaaccagattacggcgtttcacagcggcgcaatgatgcgttcgtacgaaaatcacgttcgtgatgtgccgggtgttaccttgggcctcgtaggtcctgatggacgcgagggcatgatccaaaatgccgaagaatttgctgctatgggcattccgttcatttttgacccaggtcaggcagtgcctctgttcagcggcccggaactgcgcgaatttatcgaacaggcggactatgtggtggtcaacgattacgaaagccgccttcttcaagcccgtactggctggaacgagcaggacattgttagccgcgtgcaggcgtatatcaccacgcaaggttcggctggagccgtggtacatacaccggagaagacctacagcattccggctgctaaaactcgtcgtgtcgttgatccaactggttgcggcgacgcgtttcgcgccggcctgatctatggtattcagcatgaatatgattggttgaccattggccgcatgggaaacttaatgggtgcgctgaaagtggaacaccctggcacccaaaatcagcgtttcgattttgccgaattcaacgaccagttcaaacaatattttggctacgcgctc

SEQ ID NO: 1654 - protein, 321 aa, synthetic construct
  REGION 1..321: note = variant of adenosine kinase from Xanthemonas campestris
MHHHHHHGGSGMSALICGSLAYDNIMVFPDYFKNHILPDRVHRLNVSFLVFDMRREFGGCAGNIAYNLHLLGGAPIVMATVGQDFGPYREHFETLGIDLSRVKIIDDLSTPQGFITTDMDQNQITAFHSGAMMRSYENHVRDVPGVTLGLVGPDGREGMIQNAEEFAAMGIPFIFDPGQAVPLFSGPELREFIEQADYVVVNDYESRLLQARTGWNEQDIVSRVQAYITTQGSAGAVVHTPEKTYSIPAAKTRRVVDPTGCGDAFRAGLIYGIQHEYDWLTIGRMGNLMGALKVEHPGTQNQRFDFAEFNDQFKQYFGYAL

SEQ ID NO: 1655 - DNA, 963 bp, synthetic construct
  misc_feature 1..963: note = variant of adenosine kinase from Xanthemonas campestris
  source 1..963: mol_type = other DNA
atgcatcatcaccatcaccatggggggtccggtatgagtgcactcatttgcggttctttagcgtatgataacatcatggtgtttccggaccagttcaagaaccatattctgcccgatcgtgttcaccgcctcaatgtcagctttctggtatttgacatgcgtcgtgaatttggaggctgtgccggcaacattgcgtacaatctgcatctgttgggtggtcgcccgatcgtaatggctacggtgggccaagatttcggtccgtatcgcgaacacttcgaaactctgggcattgacttatcccgcgtcaagatcatcgatgatctgagtacaccgcaggggttcattaccaccgacatggatcaaaaccagattacggcgtttcacagcggcgcaatgatgcgttcgtacgaaaatcacgttcgtgatgtgccgggtgttaccttgggcctcgtaggtcctgatggacgcgagggcatgatccaaaatgccgaagaatttgctgctatgggcattccgttcatttttgacccaggtcaggcagtgcctctgttcagcggcccggaactgcgcgaatttatcgaacaggcggactatgtggtggtcaacgattacgaaagccgtcttcttcaagcccgtactggctggaacgagcaggacattgttagccgcgtgcaggcgtatatcaccacgcaaggttcggctggagccgtggtacatacaccggagaagcgctacgatattccggctgctaaaactcgtcgtgtcgttgatccaactggttgcggcgacgcgtttcgcgccggcctgatctatggtattcagcatgaatatgattggttgaccattggccgcatgggaaacttaatgggtgcgctgaaagtggaacaccctggcacccaaaatcagcgtttcgattttgccgaattcaacgaccagttcaaacaatattttggctacgcgctc

SEQ ID NO: 1656 - protein, 321 aa, synthetic construct
  REGION 1..321: note = variant of adenosine kinase from Xanthemonas campestris
MHHHHHHGGSGMSALICGSLAYDNIMVFPDQFKNHILPDRVHRLNVSFLVFDMRREFGGCAGNIAYNLHLLGGRPIVMATVGQDFGPYREHFETLGIDLSRVKIIDDLSTPQGFITTDMDQNQITAFHSGAMMRSYENHVRDVPGVTLGLVGPDGREGMIQNAEEFAAMGIPFIFDPGQAVPLFSGPELREFIEQADYVVVNDYESRLLQARTGWNEQDIVSRVQAYITTQGSAGAVVHTPEKRYDIPAAKTRRVVDPTGCGDAFRAGLIYGIQHEYDWLTIGRMGNLMGALKVEHPGTQNQRFDFAEFNDQFKQYFGYAL

SEQ ID NO: 1657 - DNA, 963 bp, synthetic construct
  misc_feature 1..963: note = variant of adenosine kinase from Xanthemonas campestris
  source 1..963: mol_type = other DNA
atgcatcatcaccatcaccatggggggtccggtatgagtgcactcatttgcggttctttagcgtatgataacatcatggtgtttccggaccggttcaagaaccatattctgcccgatcgtgttcaccgcctcaatgtcagctttctggtatttgacatgcgtcgtgaatttggaggctgtgccggcaacattgcgtacaatctgcatctgttgggtggtcgcccgatcgtaatggctacggtgggccaagatttcggtccgtatcgcgaacacttcgaaactctgggcattgacttatcccgcgtcaagatcatcgatgatctgagtacaccgcaggggttcattaccaccgacatggatcaaaaccagattacggcgtttcacagcggcgcaatgatgcgttcgtacgaaaatcacgttcgtgatgtgccgggtgttaccttgggcctcgtaggtcctgatggacgcgagggcatgatccaaaatgccgaagaatttgctgctatgggcattccgttcatttttgacccaggtcaggcagtgcctctgttcagcggcccggaactgcgcgaatttatcgaacaggcggactatgtggtggtcaacgattacgaaagccgtcttcttcaagcccgtactggctggaacgagcaggacattgttagccgcgtgcaggcgtatatcaccacgcaaggttcggctggagccgtggtacatacaccggagaagacctacgatattccggctgctaaaactcgtcgtgtcgttgatccaactggttgcggcgacgcgtttcgcgccggcctgatctatggtattcagcatgaatatgattggttgaccattggccgcatgggaaacttaatgggtgcgctgaaagtggaacaccctggcacccaaaatcagcgtttcgattttgccgaattcaacgaccagttcaaacaatattttggctacgcgctc

SEQ ID NO: 1658 - protein, 321 aa, synthetic construct
  REGION 1..321: note = variant of adenosine kinase from Xanthemonas campestris
MHHHHHHGGSGMSALICGSLAYDNIMVFPDRFKNHILPDRVHRLNVSFLVFDMRREFGGCAGNIAYNLHLLGGRPIVMATVGQDFGPYREHFETLGIDLSRVKIIDDLSTPQGFITTDMDQNQITAFHSGAMMRSYENHVRDVPGVTLGLVGPDGREGMIQNAEEFAAMGIPFIFDPGQAVPLFSGPELREFIEQADYVVVNDYESRLLQARTGWNEQDIVSRVQAYITTQGSAGAVVHTPEKTYDIPAAKTRRVVDPTGCGDAFRAGLIYGIQHEYDWLTIGRMGNLMGALKVEHPGTQNQRFDFAEFNDQFKQYFGYAL

SEQ ID NO: 1659 - DNA, 963 bp, synthetic construct
  misc_feature 1..963: note = variant of adenosine kinase from Xanthemonas campestris
  source 1..963: mol_type = other DNA
atgcatcatcaccatcaccatggggggtccggtatgagtgcactcatttgcggttctttagcgtatgataacatcatggtgtttccggaccagttcaagaaccatattctgcccgatcgtgttcaccgcctcaatgtcagctttctggtatttgacctgcgtcgtgaatttggaggctgtgccggcaacattgcgtacaatctgcatctgttgggtggtaccccgatcgtaatggctacggtgggccaagatttcggtccgtatcgcgaacacttcgaaactctgggcattgacttatcccgcgtcaagatcatcgatgatctgagtacaccgcaggggttcattaccaccgacatggatcaaaaccagattacggcgtttcacagcggcgcaatgatgcgttcgtacgaaaatcacgttcgtgatgtgccgggtgttaccttgggcctcgtaggtcctgatggacgcgagggcatgatccaaaatgccgaagaatttgctgctatgggcattccgttcatttttgacccaggtcaggcagtgcctctgttcagcggcccggaactgcgcgaatttatcgaacaggcggactatgtggtggtcaacgattacgaaagccgccttcttcaagcccgtactggctggaacgagcaggacattgttagccgcgtgcaggcgtatatcaccacgcaaggttcggctggagccgtggtaatgacaccggagaagcgctacagcattccggctgctaaaactcgtcgtgtcgttgatccaactggttgcggcgacgcgtttcgcgccggcctgatctatggtattcagcatgaatatgattggttgaccattggccgcatgggaaacttaatgggtgcgctgaaagtggaacaccctggcacccaaaatcagcgtttcgattttgccgaattcaacgaccagttcaaacaatattttggctacgcgctc

SEQ ID NO: 1660 - protein, 321 aa, synthetic construct
  REGION 1..321: note = variant of adenosine kinase from Xanthemonas campestris
MHHHHHHGGSGMSALICGSLAYDNIMVFPDQFKNHILPDRVHRLNVSFLVFDLRREFGGCAGNIAYNLHLLGGTPIVMATVGQDFGPYREHFETLGIDLSRVKIIDDLSTPQGFITTDMDQNQITAFHSGAMMRSYENHVRDVPGVTLGLVGPDGREGMIQNAEEFAAMGIPFIFDPGQAVPLFSGPELREFIEQADYVVVNDYESRLLQARTGWNEQDIVSRVQAYITTQGSAGAVVMTPEKRYSIPAAKTRRVVDPTGCGDAFRAGLIYGIQHEYDWLTIGRMGNLMGALKVEHPGTQNQRFDFAEFNDQFKQYFGYAL

SEQ ID NO: 1661 - DNA, 963 bp, synthetic construct
  misc_feature 1..963: note = variant of adenosine kinase from Xanthemonas campestris
  source 1..963: mol_type = other DNA
atgcatcatcaccatcaccatggggggtccggtatgagtgcactcatttgcggttctttagcgtatgataacatcatggtgtttccggaccagttcaagaaccatattctgcccgatcgtgttcaccgcctcaatgtcagctttctggtatttgacctgcgtcgtgaatttggaggctgtgccggcaacattgcgtacaatctgcatctgttgggtggtcgcccgatcgtaatggctacggtgggccaagatttcggtccgtatcgcgaacacttcgaaactctgggcattgacttatcccgcgtcaagatcatcgatgatctgagtacaccgcaggggttcattaccaccgacatggatcaaaaccagattacggcgtttcacagcggcgcaatgatgcgttcgtacgaaaatcacgttcgtgatgtgccgggtgttaccttgggcctcgtaggtcctgatggacgcgagggcatgatccaaaatgccgaagaatttgctgctatgggcattccgttcatttttgacccaggtcaggcagtgcctctgttcagcggcccggaactgcgcgaatttatcgaacaggcggactatgtggtggtcaacgattacgaaagccgccttcttcaagcccgtactggctggaacgagcaggacattgttagccgcgtgcaggcgtatatcaccacgcaaggttcggctggagccgtggtaatgacaccggagaagcgctacgttattccggctgctaaaactcgtcgtgtcgttgatccaactggttgcggcgacgcgtttcgcgccggcctgatctatggtattcagcatgaatatgattggttgaccattggccgcatgggaaacttaatgggtgcgctgaaagtggaacaccctggcacccaaaatcagcgtttcgattttgccgaattcaacgaccagttcaaacaatattttggctacgcgctc

SEQ ID NO: 1662 - protein, 321 aa, synthetic construct
  REGION 1..321: note = variant of adenosine kinase from Xanthemonas campestris
MHHHHHHGGSGMSALICGSLAYDNIMVFPDQFKNHILPDRVHRLNVSFLVFDLRREFGGCAGNIAYNLHLLGGRPIVMATVGQDFGPYREHFETLGIDLSRVKIIDDLSTPQGFITTDMDQNQITAFHSGAMMRSYENHVRDVPGVTLGLVGPDGREGMIQNAEEFAAMGIPFIFDPGQAVPLFSGPELREFIEQADYVVVNDYESRLLQARTGWNEQDIVSRVQAYITTQGSAGAVVMTPEKRYVIPAAKTRRVVDPTGCGDAFRAGLIYGIQHEYDWLTIGRMGNLMGALKVEHPGTQNQRFDFAEFNDQFKQYFGYAL

SEQ ID NO: 1663 - DNA, 963 bp, synthetic construct
  misc_feature 1..963: note = variant of adenosine kinase from Xanthemonas campestris
  source 1..963: mol_type = other DNA
atgcatcatcaccatcaccatggggggtccggtatgagtgcactcatttgcggttctttagcgtatgataacatcatggtgtttccggaccggttcaagaaccatattctgcccgatcgtgttcaccgcctcaatgtcagctttctggtatttgacatgcgtcgtgaatttggaggctgtgccggcaacattgcgtacaatctgcatctgttgggtggtaccccgatcgtaatggctacggtgggccaagatttcggtccgtatcgcgaacacttcgaaactctgggcattgacttatcccgcgtcaagatcatcgatgatctgagtacaccgcaggggttcattaccaccgacatggatcaaaaccagattacggcgtttcacagcggcgcaatgatgcgttcgtacgaaaatcacgttcgtgatgtgccgggtgttaccttgggcctcgtaggtcctgatggacgcgagggcatgatccaaaatgccgaagaatttgctgctatgggcattccgttcatttttgacccaggtcaggcagtgcctctgttcagcggcccggaactgcgcgaatttatcgaacaggcggactatgtggtggtcaacgattacgaaagcatgcttcttcaagcccgtactggctggaacgagcaggacattgttagccgcgtgcaggcgtatatcaccacgcaaggttcggctggagccgtggtacatacaccggagaagcgctacagcattccggctgctaaaactcgtcgtgtcgttgatccaactggttgcggcgacgcgtttcgcgccggcctgatctatggtattcagcatgaatatgattggttgaccattggccgcatgggaaacttaatgggtgcgctgaaagtggaacaccctggcacccaaaatcagcgtttcgattttgccgaattcaacgaccagttcaaacaatattttggctacgcgctc

SEQ ID NO: 1664 - protein, 321 aa, synthetic construct
  REGION 1..321: note = variant of adenosine kinase from Xanthemonas campestris
MHHHHHHGGSGMSALICGSLAYDNIMVFPDRFKNHILPDRVHRLNVSFLVFDMRREFGGCAGNIAYNLHLLGGTPIVMATVGQDFGPYREHFETLGIDLSRVKIIDDLSTPQGFITTDMDQNQITAFHSGAMMRSYENHVRDVPGVTLGLVGPDGREGMIQNAEEFAAMGIPFIFDPGQAVPLFSGPELREFIEQADYVVVNDYESMLLQARTGWNEQDIVSRVQAYITTQGSAGAVVHTPEKRYSIPAAKTRRVVDPTGCGDAFRAGLIYGIQHEYDWLTIGRMGNLMGALKVEHPGTQNQRFDFAEFNDQFKQYFGYAL

SEQ ID NO: 1665 - DNA, 963 bp, synthetic construct
  misc_feature 1..963: note = variant of adenosine kinase from Xanthemonas campestris
  source 1..963: mol_type = other DNA
atgcatcatcaccatcaccatggggggtccggtatgagtgcactcatttgcggttctttagcgtatgataacatcatggtgtttccggactatttcaagaaccatattctgcccgatcgtgttcaccgcctcaatgtcagctttctggtatttgacatgcgtcgtgaatttggaggctgtgccggcaacattgcgtacaatctgcatctgttgggtggtcgcccgatcgtaatggctacggtgggccaagatttcggtccgtatcgcgaacacttcgaaactctgggcattgacttatcccgcgtcaagatcatcgatgatctgagtacaccgcaggggttcattaccaccgacatggatcaaaaccagattacggcgtttcacagcggcgcaatgatgcgttcgtacgaaaatcacgttcgtgatgtgccgggtgttaccttgggcctcgtaggtcctgatggacgcgagggcatgatccaaaatggcgaagaatttgctgctatgggcattccgttcatttttgacccaggtcaggcagtgcctctgttcagcggcccggaactgcgcgaatttatcgaacaggcggactatgtggtggtcaacgattacgaaagccgccttcttcaagcccgtactggctggaacgagcaggacattgttagccgcgtgcaggcgtatatcaccacgcaaggttcggctggagccgtggtaatgacaccggagaagcgctacgatattccggctgctaaaactcgtcgtgtcgttgatccaactggttgcggcgacgcgtttcgcgccggcctgatctatggtattcagcatgaatatgattggttgaccattggccgcatgggaaacttaatgggtgcgctgaaagtggaacaccctggcacccaaaatcagcgtttcgattttgccgaattcaacgaccagttcaaacaatattttggctacgcgctc

SEQ ID NO: 1666 - protein, 321 aa, synthetic construct
  REGION 1..321: note = variant of adenosine kinase from Xanthemonas campestris
MHHHHHHGGSGMSALICGSLAYDNIMVFPDYFKNHILPDRVHRLNVSFLVFDMRREFGGCAGNIAYNLHLLGGRPIVMATVGQDFGPYREHFETLGIDLSRVKIIDDLSTPQGFITTDMDQNQITAFHSGAMMRSYENHVRDVPGVTLGLVGPDGREGMIQNGEEFAAMGIPFIFDPGQAVPLFSGPELREFIEQADYVVVNDYESRLLQARTGWNEQDIVSRVQAYITTQGSAGAVVMTPEKRYDIPAAKTRRVVDPTGCGDAFRAGLIYGIQHEYDWLTIGRMGNLMGALKVEHPGTQNQRFDFAEFNDQFKQYFGYAL

SEQ ID NO: 1667 - DNA, 963 bp, synthetic construct
  misc_feature 1..963: note = variant of adenosine kinase from Xanthemonas campestris
  source 1..963: mol_type = other DNA
atgcatcatcaccatcaccatggggggtccggtatgagtgcactcatttgcggttctttagcgtatgataacatcatggtgtttccggactatttcaagaaccatattctgcccgatcgtgttcaccgcctcaatgtcagctttctggtatttgacatgcgtcgtgaatttggaggctgtgccggcaacattgcgtacaatctgcatctgttgggtggtcgcccgatcgtaatggctacggtgggccaagatttcggtccgtatcgcgaacacttcgaaactctgggcattgacttatcccgcgtcaagatcatcgatgatctgagtacaccgcaggggttcattaccaccgacatggatcaaaaccagattacggcgtttcacagcggcgcaatgatgcgttcgtacgaaaatcacgttcgtgatgtgccgggtgttaccttgggcctcgtaggtcctgatggacgcgagggcatgatccaaaatgccgaagaatttgctgctatgggcattccgttcatttttgacccaggtcaggcagtgcctctgttcagcggcccggaactgcgcgaatttatcgaacaggcggactatgtggtggtcaacgattacgaaagccgccttcttcaagcccgtactggctggaacgagcaggacattgttagccgcgtgcaggcgtatatcaccacgcaaggttcggctggagccgtggtaatgacaccggagaagcgctacgttattccggctgctaaaactcgtcgtgtcgttgatccaactggttgcggcgacgcgtttcgcgccggcctgatctatggtattcagcatgaatatgattggttgaccattggccgcatgggaaacttaatgggtgcgctgaaagtggaacaccctggcacccaaaatcagcgtttcgattttgccgaattcaacgaccagttcaaacaatattttggctacgcgctc

SEQ ID NO: 1668 - protein, 321 aa, synthetic construct
  REGION 1..321: note = variant of adenosine kinase from Xanthemonas campestris
MHHHHHHGGSGMSALICGSLAYDNIMVFPDYFKNHILPDRVHRLNVSFLVFDMRREFGGCAGNIAYNLHLLGGRPIVMATVGQDFGPYREHFETLGIDLSRVKIIDDLSTPQGFITTDMDQNQITAFHSGAMMRSYENHVRDVPGVTLGLVGPDGREGMIQNAEEFAAMGIPFIFDPGQAVPLFSGPELREFIEQADYVVVNDYESRLLQARTGWNEQDIVSRVQAYITTQGSAGAVVMTPEKRYVIPAAKTRRVVDPTGCGDAFRAGLIYGIQHEYDWLTIGRMGNLMGALKVEHPGTQNQRFDFAEFNDQFKQYFGYAL

SEQ ID NO: 1669 - DNA, 963 bp, synthetic construct
  misc_feature 1..963: note = variant of adenosine kinase from Xanthemonas campestris
  source 1..963: mol_type = other DNA
atgcatcatcaccatcaccatggggggtccggtatgagtgcactcatttgcggttctttagcgtatgataacatcatggtgtttccggacctgttcaagaaccatattctgcccgatcgtgttcaccgcctcaatgtcagctttctggtatttgacatgcgtcgtgaatttggaggctgtgccggcaacattgcgtacaatctgcatctgttgggtggtgccccgatcgtaatggctacggtgggccaagatttcggtccgtatcgcgaacacttcgaaactctgggcattgacttatcccgcgtcaagatcatcgatgatctgagtacaccgcaggggttcattaccaccgacatggatcaaaaccagattacggcgtttcacagcggcgcaatgatgcgttcgtacgaaaatcacgttcgtgatgtgccgggtgttaccttgggcctcgtaggtcctgatggacgcgagggcatgatccaaaatgccgaagaatttgctgctatgggcattccgttcatttttgacccaggtcaggcagtgcctctgttcagcggcccggaactgcgcgaatttatcgaacaggcggactatgtggtggtcaacgattacgaaagccgccttcttcaagcccgtactggctggaacgagcaggacattgttagccgcgtgcaggcgtatatcaccacgcaaggttcggctggagccgtggtacatacaccggagaagcgctacagcattccggctgctaaaactcgtcgtgtcgttgatccaactggttgcggcgacgcgtttcgcgccggcctgatctatggtattcagcatgaatatgattggttgaccattggccgcatgggaaacttaatgggtgcgctgaaagtggaacaccctggcacccaaaatcagcgtttcgattttgccgaattcaacgaccagttcaaacaatattttggctacgcgctc

SEQ ID NO: 1670 - protein, 321 aa, synthetic construct
  REGION 1..321: note = variant of adenosine kinase from Xanthemonas campestris
MHHHHHHGGSGMSALICGSLAYDNIMVFPDLFKNHILPDRVHRLNVSFLVFDMRREFGGCAGNIAYNLHLLGGAPIVMATVGQDFGPYREHFETLGIDLSRVKIIDDLSTPQGFITTDMDQNQITAFHSGAMMRSYENHVRDVPGVTLGLVGPDGREGMIQNAEEFAAMGIPFIFDPGQAVPLFSGPELREFIEQADYVVVNDYESRLLQARTGWNEQDIVSRVQAYITTQGSAGAVVHTPEKRYSIPAAKTRRVVDPTGCGDAFRAGLIYGIQHEYDWLTIGRMGNLMGALKVEHPGTQNQRFDFAEFNDQFKQYFGYAL

SEQ ID NO: 1671 - DNA, 963 bp, synthetic construct
  misc_feature 1..963: note = variant of adenosine kinase from Xanthemonas campestris
  source 1..963: mol_type = other DNA
atgcatcatcaccatcaccatggggggtccggtatgagtgcactcatttgcggttctttagcgtatgataacatcatggtgtttccggactatttcaagaaccatattctgcccgatcgtgttcaccgcctcaatgtcagctttctggtatttgacatgcgtcgtgaatttggaggctgtgccggcaacattgcgtacaatctgcatctgttgggtggtgctccgatcgtaatggctacggtgggccaagatttcggtccgtatcgcgaacacttcgaaactctgggcattgacttatcccgcgtcaagatcatcgatgatctgagtacaccgcaggggttcattaccaccgacatggatcaaaaccagattacggcgtttcacagcggcgcaatgatgcgttcgtacgaaaatcacgttcgtgatgtgccgggtgttaccttgggcctcgtaggtcctgatggacgcgagggcatgatccaaaatgccgaagaatttgctgctatgggcattccgttcatttttgacccaggtcaggcagtgcctctgttcagcggcccggaactgcgcgaatttatcgaacaggcggactatgtggtggtcaacgattacgaaagccgtcttcttcaagcccgtactggctggaacgagcaggacattgttagccgcgtgcaggcgtatatcaccacgcaaggttcggctggagccgtggtacatacaccggagaagcgctacagcattccggctgctaaaactcgtcgtgtcgttgatccaactggttgcggcgacgcgtttcgcgccggcctgatctatggtattcagcatgaatatgattggttgaccattggccgcatgggaaacttaatgggtgcgctgaaagtggaacaccctggcacccaaaatcagcgtttcgattttgccgaattcaacgaccagttcaaacaatattttggctacgcgctc

SEQ ID NO: 1672 - protein, 321 aa, synthetic construct
  REGION 1..321: note = variant of adenosine kinase from Xanthemonas campestris
MHHHHHHGGSGMSALICGSLAYDNIMVFPDYFKNHILPDRVHRLNVSFLVFDMRREFGGCAGNIAYNLHLLGGAPIVMATVGQDFGPYREHFETLGIDLSRVKIIDDLSTPQGFITTDMDQNQITAFHSGAMMRSYENHVRDVPGVTLGLVGPDGREGMIQNAEEFAAMGIPFIFDPGQAVPLFSGPELREFIEQADYVVVNDYESRLLQARTGWNEQDIVSRVQAYITTQGSAGAVVHTPEKRYSIPAAKTRRVVDPTGCGDAFRAGLIYGIQHEYDWLTIGRMGNLMGALKVEHPGTQNQRFDFAEFNDQFKQYFGYAL

SEQ ID NO: 1673 - DNA, 963 bp, synthetic construct
  misc_feature 1..963: note = variant of adenosine kinase from Xanthemonas campestris
  source 1..963: mol_type = other DNA
atgcatcatcaccatcaccatggggggtccggtatgagtgcactcatttgcggttctttagcgtatgataacatcatggtgtttccggaccggttcaagaaccatattctgcccgatcgtgttcaccgcctcaatgtcagctttctggtatttgacctgcgtcgtgaatttggaggctgtgccggcaacattgcgtacaatctgcatctgttgggtggtgccccgatcgtaatggctacggtgggccaagatttcggtccgtatcgcgaacacttcgaaactctgggcattgacttatcccgcgtcaagatcatcgatgatctgagtacaccgcaggggttcattaccaccgacatggatcaaaaccagattacggcgtttcacagcggcgcaatgatgcgttcgtacgaaaatcacgttcgtgatgtgccgggtgttaccttgggcctcgtaggtcctgatggacgcgagggcatgatccaaaatgcccaagaatttgctgctatgggcattccgttcatttttgacccaggtcaggcagtgcctctgttcagcggcccggaactgcgcgaatttatcgaacaggcggactatgtggtggtcaacgattacgaaagccgccttcttcaagcccgtactggctggaacgagcaggacattgttagccgcgtgcaggcgtatatcaccacgcaaggttcggctggagccgtggtacatacaccggagaagacctacgatattccggctgctaaaactcgtcgtgtcgttgatccaactggttgcggcgacgcgtttcgcgccggcctgatctatggtattcagcatgaatatgattggttgaccattggccgcatgggaaacttaatgggtgcgctgaaagtggaacaccctggcacccaaaatcagcgtttcgattttgccgaattcaacgaccagttcaaacaatattttggctacgcgctc

SEQ ID NO: 1674 - protein, 321 aa, synthetic construct
  REGION 1..321: note = variant of adenosine kinase from Xanthemonas campestris
MHHHHHHGGSGMSALICGSLAYDNIMVFPDRFKNHILPDRVHRLNVSFLVFDLRREFGGCAGNIAYNLHLLGGAPIVMATVGQDFGPYREHFETLGIDLSRVKIIDDLSTPQGFITTDMDQNQITAFHSGAMMRSYENHVRDVPGVTLGLVGPDGREGMIQNAQEFAAMGIPFIFDPGQAVPLFSGPELREFIEQADYVVVNDYESRLLQARTGWNEQDIVSRVQAYITTQGSAGAVVHTPEKTYDIPAAKTRRVVDPTGCGDAFRAGLIYGIQHEYDWLTIGRMGNLMGALKVEHPGTQNQRFDFAEFNDQFKQYFGYAL

SEQ ID NO: 1675 - DNA, 963 bp, synthetic construct
  misc_feature 1..963: note = variant of adenosine kinase from Xanthemonas campestris
  source 1..963: mol_type = other DNA
atgcatcatcaccatcaccatggggggtccggtatgagtgcactcatttgcggttctttagcgtatgataacatcatggtgtttccggaccggttcaagaaccatattctgcccgatcgtgttcaccgcctcaatgtcagctttctggtatttgacatgcgtcgtgaatttggaggctgtgccggcaacattgcgtacaatctgcatctgttgggtggtgctccgatcgtaatggctacggtgggccaagatttcggtccgtatcgcgaacacttcgaaactctgggcattgacttatcccgcgtcaagatcatcgatgatctgagtacaccgcaggggttcattaccaccgacatggatcaaaaccagattacggcgtttcacagcggcgcaatgatgcgttcgtacgaaaatcacgttcgtgatgtgccgggtgttaccttgggcctcgtaggtcctgatggacgcgagggcatgatccaaaatgccgaagaatttgctgctatgggcattccgttcatttttgacccaggtcaggcagtgcctctgttcagcggcccggaactgcgcgaatttatcgaacaggcggactatgtggtggtcaacgattacgaaagccgccttcttcaagcccgtactggctggaacgagcaggacattgttagccgcgtgcaggcgtatatcaccacgcaaggttcggctggagccgtggtaatgacaccggagaagcgctacgatattccggctgctaaaactcgtcgtgtcgttgatccaactggttgcggcgacgcgtttcgcgccggcctgatctatggtattcagcatgaatatgattggttgaccattggccgcatgggaaacttaatgggtgcgctgaaagtggaacaccctggcacccaaaatcagcgtttcgattttgccgaattcaacgaccagttcaaacaatattttggctacgcgctc

SEQ ID NO: 1676 - protein, 321 aa, synthetic construct
  REGION 1..321: note = variant of adenosine kinase from Xanthemonas campestris
MHHHHHHGGSGMSALICGSLAYDNIMVFPDRFKNHILPDRVHRLNVSFLVFDMRREFGGCAGNIAYNLHLLGGAPIVMATVGQDFGPYREHFETLGIDLSRVKIIDDLSTPQGFITTDMDQNQITAFHSGAMMRSYENHVRDVPGVTLGLVGPDGREGMIQNAEEFAAMGIPFIFDPGQAVPLFSGPELREFIEQADYVVVNDYESRLLQARTGWNEQDIVSRVQAYITTQGSAGAVVMTPEKRYDIPAAKTRRVVDPTGCGDAFRAGLIYGIQHEYDWLTIGRMGNLMGALKVEHPGTQNQRFDFAEFNDQFKQYFGYAL

SEQ ID NO: 1677 - DNA, 963 bp, synthetic construct
  misc_feature 1..963: note = variant of adenosine kinase from Xanthemonas campestris
  source 1..963: mol_type = other DNA
atgcatcatcaccatcaccatggggggtccggtatgagtgcactcatttgcggttctttagcgtatgataacatcatggtgtttccggaccagttcaagaaccatattctgcccgatcgtgttcaccgcctcaatgtcagctttctggtatttgacatgcgtcgtgaatttggaggctgtgccggcaacattgcgtacaatctgcatctgttgggtggtgctccgatcgtaatggctacggtgggccaagatttcggtccgtatcgcgaacacttcgaaactctgggcattgacttatcccgcgtcaagatcatcgatgatctgagtacaccgcaggggttcattaccaccgacatggatcaaaaccagattacggcgtttcacagcggcgcaatgatgcgttcgtacgaaaatcacgttcgtgatgtgccgggtgttaccttgggcctcgtaggtcctgatggacgcgagggcatgatccaaaatgccgaagaatttgctgctatgggcattccgttcatttttgacccaggtcaggcagtgcctctgttcagcggcccggaactgcgcgaatttatcgaacaggcggactatgtggtggtcaacgattacgaaagccgtcttcttcaagcccgtactggctggaacgagcaggacattgttagccgcgtgcaggcgtatatcaccacgcaaggttcggctggagccgtggtaatgacaccggagaagacctacgttattccggctgctaaaactcgtcgtgtcgttgatccaactggttgcggcgacgcgtttcgcgccggcctgatctatggtattcagcatgaatatgattggttgaccattggccgcatgggaaacttaatgggtgcgctgaaagtggaacaccctggcacccaaaatcagcgtttcgattttgccgaattcaacgaccagttcaaacaatattttggctacgcgctc

SEQ ID NO: 1678 - protein, 321 aa, synthetic construct
  REGION 1..321: note = variant of adenosine kinase from Xanthemonas campestris
MHHHHHHGGSGMSALICGSLAYDNIMVFPDQFKNHILPDRVHRLNVSFLVFDMRREFGGCAGNIAYNLHLLGGAPIVMATVGQDFGPYREHFETLGIDLSRVKIIDDLSTPQGFITTDMDQNQITAFHSGAMMRSYENHVRDVPGVTLGLVGPDGREGMIQNAEEFAAMGIPFIFDPGQAVPLFSGPELREFIEQADYVVVNDYESRLLQARTGWNEQDIVSRVQAYITTQGSAGAVVMTPEKTYVIPAAKTRRVVDPTGCGDAFRAGLIYGIQHEYDWLTIGRMGNLMGALKVEHPGTQNQRFDFAEFNDQFKQYFGYAL

SEQ ID NO: 1679 - DNA, 963 bp, synthetic construct
  misc_feature 1..963: note = variant of adenosine kinase from Xanthemonas campestris
  source 1..963: mol_type = other DNA
atgcatcatcaccatcaccatggggggtccggtatgagtgcactcatttgcggttctttagcgtatgataacatcatggtgtttccggaccagttcaagaaccatattctgcccgatcgtgttcaccgcctcaatgtcagctttctggtatttgacatgcgtcgtgaatttggaggctgtgccggcaacattgcgtacaatctgcatctgttgggtggtgctccgatcgtaatggctacggtgggccaagatttcggtccgtatcgcgaacacttcgaaactctgggcattgacttatcccgcgtcaagatcatcgatgatctgagtacaccgcaggggttcattaccaccgacatggatcaaaaccagattacggcgtttcacagcggcgcaatgatgcgttcgtacgaaaatcacgttcgtgatgtgccgggtgttaccttgggcctcgtaggtcctgatggacgcgagggcatgatccaaaatggccaagaatttgctgctatgggcattccgttcatttttgacccaggtcaggcagtgcctctgttcagcggcccggaactgcgcgaatttatcgaacaggcggactatgtggtggtcaacgattacgaaagcatgcttcttcaagcccgtactggctggaacgagcaggacattgttagccgcgtgcaggcgtatatcaccacgcaaggttcggctggagccgtggtaatgacaccggagaagcgctacgttattccggctgctaaaactcgtcgtgtcgttgatccaactggttgcggcgacgcgtttcgcgccggcctgatctatggtattcagcatgaatatgattggttgaccattggccgcatgggaaacttaatgggtgcgctgaaagtggaacaccctggcacccaaaatcagcgtttcgattttgccgaattcaacgaccagttcaaacaatattttggctacgcgctc

SEQ ID NO: 1680 - protein, 321 aa, synthetic construct
  REGION 1..321: note = variant of adenosine kinase from Xanthemonas campestris
MHHHHHHGGSGMSALICGSLAYDNIMVFPDQFKNHILPDRVHRLNVSFLVFDMRREFGGCAGNIAYNLHLLGGAPIVMATVGQDFGPYREHFETLGIDLSRVKIIDDLSTPQGFITTDMDQNQITAFHSGAMMRSYENHVRDVPGVTLGLVGPDGREGMIQNGQEFAAMGIPFIFDPGQAVPLFSGPELREFIEQADYVVVNDYESMLLQARTGWNEQDIVSRVQAYITTQGSAGAVVMTPEKRYVIPAAKTRRVVDPTGCGDAFRAGLIYGIQHEYDWLTIGRMGNLMGALKVEHPGTQNQRFDFAEFNDQFKQYFGYAL

SEQ ID NO: 1681 - DNA, 963 bp, synthetic construct
  misc_feature 1..963: note = variant of adenosine kinase from Xanthemonas campestris
  source 1..963: mol_type = other DNA
atgcatcatcaccatcaccatggggggtccggtatgagtgcactcatttgcggttctttagcgtatgataacatcatggtgtttccggactatttcaagaaccatattctgcccgatcgtgttcaccgcctcaatgtcagctttctggtatttgacatgcgtcgtgaatttggaggctgtgccggcaacattgcgtacaatctgcatctgttgggtggtcgcccgatcgtaatggctacggtgggccaagatttcggtccgtatcgcgaacacttcgaaactctgggcattgacttatcccgcgtcaagatcatcgatgatctgagtacaccgcaggggttcattaccaccgacatggatcaaaaccagattacggcgtttcacagcggcgcaatgatgcgttcgtacgaaaatcacgttcgtgatgtgccgggtgttaccttgggcctcgtaggtcctgatggacgcgagggcatgatccaaaatggcgaagaatttgctgctatgggcattccgttcatttttgacccaggtcaggcagtgcctctgttcagcggcccggaactgcgcgaatttatcgaacaggcggactatgtggtggtcaacgattacgaaagccgccttcttcaagcccgtactggctggaacgagcaggacattgttagccgcgtgcaggcgtatatcaccacgcaaggttcggctggagccgtggtacatacaccggagaagacctacgttattccggctgctaaaactcgtcgtgtcgttgatccaactggttgcggcgacgcgtttcgcgccggcctgatctatggtattcagcatgaatatgattggttgaccattggccgcatgggaaacttaatgggtgcgctgaaagtggaacaccctggcacccaaaatcagcgtttcgattttgccgaattcaacgaccagttcaaacaatattttggctacgcgctc

SEQ ID NO: 1682 - protein, 321 aa, synthetic construct
  REGION 1..321: note = variant of adenosine kinase from Xanthemonas campestris
MHHHHHHGGSGMSALICGSLAYDNIMVFPDYFKNHILPDRVHRLNVSFLVFDMRREFGGCAGNIAYNLHLLGGRPIVMATVGQDFGPYREHFETLGIDLSRVKIIDDLSTPQGFITTDMDQNQITAFHSGAMMRSYENHVRDVPGVTLGLVGPDGREGMIQNGEEFAAMGIPFIFDPGQAVPLFSGPELREFIEQADYVVVNDYESRLLQARTGWNEQDIVSRVQAYITTQGSAGAVVHTPEKTYVIPAAKTRRVVDPTGCGDAFRAGLIYGIQHEYDWLTIGRMGNLMGALKVEHPGTQNQRFDFAEFNDQFKQYFGYAL

SEQ ID NO: 1683 - DNA, 963 bp, synthetic construct
  misc_feature 1..963: note = variant of adenosine kinase from Xanthemonas campestris
  source 1..963: mol_type = other DNA
atgcatcatcaccatcaccatggggggtccggtatgagtgcactcatttgcggttctttagcgtatgataacatcatggtgtttccggaccagttcaagaaccatattctgcccgatcgtgttcaccgcctcaatgtcagctttctggtatttgacatgcgtcgtgaatttggaggctgtgccggcaacattgcgtacaatctgcatctgttgggtggtgccccgatcgtaatggctacggtgggccaagatttcggtccgtatcgcgaacacttcgaaactctgggcattgacttatcccgcgtcaagatcatcgatgatctgagtacaccgcaggggttcattaccaccgacatggatcaaaaccagattacggcgtttcacagcggcgcaatgatgcgttcgtacgaaaatcacgttcgtgatgtgccgggtgttaccttgggcctcgtaggtcctgatggacgcgagggcatgatccaaaatgccgaagaatttgctgctatgggcattccgttcatttttgacccaggtcaggcagtgcctctgttcagcggcccggaactgcgcgaatttatcgaacaggcggactatgtggtggtcaacgattacgaaagccgtcttcttcaagcccgtactggctggaacgagcaggacattgttagccgcgtgcaggcgtatatcaccacgcaaggttcggctggagccgtggtacatacaccggagaagcgctacgatattccggctgctaaaactcgtcgtgtcgttgatccaactggttgcggcgacgcgtttcgcgccggcctgatctatggtattcagcatgaatatgattggttgaccattggccgcatgggaaacttaatgggtgcgctgaaagtggaacaccctggcacccaaaatcagcgtttcgattttgccgaattcaacgaccagttcaaacaatattttggctacgcgctc

SEQ ID NO: 1684 - protein, 321 aa, synthetic construct
  REGION 1..321: note = variant of adenosine kinase from Xanthemonas campestris
MHHHHHHGGSGMSALICGSLAYDNIMVFPDQFKNHILPDRVHRLNVSFLVFDMRREFGGCAGNIAYNLHLLGGAPIVMATVGQDFGPYREHFETLGIDLSRVKIIDDLSTPQGFITTDMDQNQITAFHSGAMMRSYENHVRDVPGVTLGLVGPDGREGMIQNAEEFAAMGIPFIFDPGQAVPLFSGPELREFIEQADYVVVNDYESRLLQARTGWNEQDIVSRVQAYITTQGSAGAVVHTPEKRYDIPAAKTRRVVDPTGCGDAFRAGLIYGIQHEYDWLTIGRMGNLMGALKVEHPGTQNQRFDFAEFNDQFKQYFGYAL

SEQ ID NO: 1685 - DNA, 963 bp, synthetic construct
  misc_feature 1..963: note = variant of adenosine kinase from Xanthemonas campestris
  source 1..963: mol_type = other DNA
atgcatcatcaccatcaccatggggggtccggtatgagtgcactcatttgcggttctttagcgtatgataacatcatggtgtttccggacctgttcaagaaccatattctgcccgatcgtgttcaccgcctcaatgtcagctttctggtatttgacatgcgtcgtgaatttggaggctgtgccggcaacattgcgtacaatctgcatctgttgggtggtgctccgatcgtaatggctacggtgggccaagatttcggtccgtatcgcgaacacttcgaaactctgggcattgacttatcccgcgtcaagatcatcgatgatctgagtacaccgcaggggttcattaccaccgacatggatcaaaaccagattacggcgtttcacagcggcgcaatgatgcgttcgtacgaaaatcacgttcgtgatgtgccgggtgttaccttgggcctcgtaggtcctgatggacgcgagggcatgatccaaaatgccgaagaatttgctgctatgggcattccgttcatttttgacccaggtcaggcagtgcctctgttcagcggcccggaactgcgcgaatttatcgaacaggcggactatgtggtggtcaacgattacgaaagccgccttcttcaagcccgtactggctggaacgagcaggacattgttagccgcgtgcaggcgtatatcaccacgcaaggttcggctggagccgtggtaatgacaccggagaagcgctacagcattccggctgctaaaactcgtcgtgtcgttgatccaactggttgcggcgacgcgtttcgcgccggcctgatctatggtattcagcatgaatatgattggttgaccattggccgcatgggaaacttaatgggtgcgctgaaagtggaacaccctggcacccaaaatcagcgtttcgattttgccgaattcaacgaccagttcaaacaatattttggctacgcgctc

SEQ ID NO: 1686 - protein, 321 aa, synthetic construct
  REGION 1..321: note = variant of adenosine kinase from Xanthemonas campestris
MHHHHHHGGSGMSALICGSLAYDNIMVFPDLFKNHILPDRVHRLNVSFLVFDMRREFGGCAGNIAYNLHLLGGAPIVMATVGQDFGPYREHFETLGIDLSRVKIIDDLSTPQGFITTDMDQNQITAFHSGAMMRSYENHVRDVPGVTLGLVGPDGREGMIQNAEEFAAMGIPFIFDPGQAVPLFSGPELREFIEQADYVVVNDYESRLLQARTGWNEQDIVSRVQAYITTQGSAGAVVMTPEKRYSIPAAKTRRVVDPTGCGDAFRAGLIYGIQHEYDWLTIGRMGNLMGALKVEHPGTQNQRFDFAEFNDQFKQYFGYAL

SEQ ID NO: 1687 - DNA, 963 bp, synthetic construct
  misc_feature 1..963: note = variant of adenosine kinase from Xanthemonas campestris
  source 1..963: mol_type = other DNA
atgcatcatcaccatcaccatggggggtccggtatgagtgcactcatttgcggttctttagcgtatgataacatcatggtgtttccggactatttcaagaaccatattctgcccgatcgtgttcaccgcctcaatgtcagctttctggtatttgacatgcgtcgtgaatttggaggctgtgccggcaacattgcgtacaatctgcatctgttgggtggtaccccgatcgtaatggctacggtgggccaagatttcggtccgtatcgcgaacacttcgaaactctgggcattgacttatcccgcgtcaagatcatcgatgatctgagtacaccgcaggggttcattaccaccgacatggatcaaaaccagattacggcgtttcacagcggcgcaatgatgcgttcgtacgaaaatcacgttcgtgatgtgccgggtgttaccttgggcctcgtaggtcctgatggacgcgagggcatgatccaaaatgccgaagaatttgctgctatgggcattccgttcatttttgacccaggtcaggcagtgcctctgttcagcggcccggaactgcgcgaatttatcgaacaggcggactatgtggtggtcaacgattacgaaagccgccttcttcaagcccgtactggctggaacgagcaggacattgttagccgcgtgcaggcgtatatcaccacgcaaggttcggctggagccgtggtacatacaccggagaagacctacgatattccggctgctaaaactcgtcgtgtcgttgatccaactggttgcggcgacgcgtttcgcgccggcctgatctatggtattcagcatgaatatgattggttgaccattggccgcatgggaaacttaatgggtgcgctgaaagtggaacaccctggcacccaaaatcagcgtttcgattttgccgaattcaacgaccagttcaaacaatattttggctacgcgctc

SEQ ID NO: 1688 - protein, 321 aa, synthetic construct
  REGION 1..321: note = variant of adenosine kinase from Xanthemonas campestris
MHHHHHHGGSGMSALICGSLAYDNIMVFPDYFKNHILPDRVHRLNVSFLVFDMRREFGGCAGNIAYNLHLLGGTPIVMATVGQDFGPYREHFETLGIDLSRVKIIDDLSTPQGFITTDMDQNQITAFHSGAMMRSYENHVRDVPGVTLGLVGPDGREGMIQNAEEFAAMGIPFIFDPGQAVPLFSGPELREFIEQADYVVVNDYESRLLQARTGWNEQDIVSRVQAYITTQGSAGAVVHTPEKTYDIPAAKTRRVVDPTGCGDAFRAGLIYGIQHEYDWLTIGRMGNLMGALKVEHPGTQNQRFDFAEFNDQFKQYFGYAL

SEQ ID NO: 1689 - DNA, 963 bp, synthetic construct
  misc_feature 1..963: note = variant of adenosine kinase from Xanthemonas campestris
  source 1..963: mol_type = other DNA
atgcatcatcaccatcaccatggggggtccggtatgagtgcactcatttgcggttctttagcgtatgataacatcatggtgtttccggacctgttcaagaaccatattctgcccgatcgtgttcaccgcctcaatgtcagctttctggtatttgacctgcgtcgtgaatttggaggctgtgccggcaacattgcgtacaatctgcatctgttgggtggtgctccgatcgtaatggctacggtgggccaagatttcggtccgtatcgcgaacacttcgaaactctgggcattgacttatcccgcgtcaagatcatcgatgatctgagtacaccgcaggggttcattaccaccgacatggatcaaaaccagattacggcgtttcacagcggcgcaatgatgcgttcgtacgaaaatcacgttcgtgatgtgccgggtgttaccttgggcctcgtaggtcctgatggacgcgagggcatgatccaaaatgccgaagaatttgctgctatgggcattccgttcatttttgacccaggtcaggcagtgcctctgttcagcggcccggaactgcgcgaatttatcgaacaggcggactatgtggtggtcaacgattacgaaagccgccttcttcaagcccgtactggctggaacgagcaggacattgttagccgcgtgcaggcgtatatcaccacgcaaggttcggctggagccgtggtaatgacaccggagaagcgctacgttattccggctgctaaaactcgtcgtgtcgttgatccaactggttgcggcgacgcgtttcgcgccggcctgatctatggtattcagcatgaatatgattggttgaccattggccgcatgggaaacttaatgggtgcgctgaaagtggaacaccctggcacccaaaatcagcgtttcgattttgccgaattcaacgaccagttcaaacaatattttggctacgcgctc

SEQ ID NO: 1690 - protein, 321 aa, synthetic construct
  REGION 1..321: note = variant of adenosine kinase from Xanthemonas campestris
MHHHHHHGGSGMSALICGSLAYDNIMVFPDLFKNHILPDRVHRLNVSFLVFDLRREFGGCAGNIAYNLHLLGGAPIVMATVGQDFGPYREHFETLGIDLSRVKIIDDLSTPQGFITTDMDQNQITAFHSGAMMRSYENHVRDVPGVTLGLVGPDGREGMIQNAEEFAAMGIPFIFDPGQAVPLFSGPELREFIEQADYVVVNDYESRLLQARTGWNEQDIVSRVQAYITTQGSAGAVVMTPEKRYVIPAAKTRRVVDPTGCGDAFRAGLIYGIQHEYDWLTIGRMGNLMGALKVEHPGTQNQRFDFAEFNDQFKQYFGYAL

SEQ ID NO: 1691 - DNA, 963 bp, synthetic construct
  misc_feature 1..963: note = variant of adenosine kinase from Xanthemonas campestris
  source 1..963: mol_type = other DNA
atgcatcatcaccatcaccatggggggtccggtatgagtgcactcatttgcggttctttagcgtatgataacatcatggtgtttccggactatttcaagaaccatattctgcccgatcgtgttcaccgcctcaatgtcagctttctggtatttgacatgcgtcgtgaatttggaggctgtgccggcaacattgcgtacaatctgcatctgttgggtggtcgcccgatcgtaatggctacggtgggccaagatttcggtccgtatcgcgaacacttcgaaactctgggcattgacttatcccgcgtcaagatcatcgatgatctgagtacaccgcaggggttcattaccaccgacatggatcaaaaccagattacggcgtttcacagcggcgcaatgatgcgttcgtacgaaaatcacgttcgtgatgtgccgggtgttaccttgggcctcgtaggtcctgatggacgcgagggcatgatccaaaatgccgaagaatttgctgctatgggcattccgttcatttttgacccaggtcaggcagtgcctctgttcagcggcccggaactgcgcgaatttatcgaacaggcggactatgtggtggtcaacgattacgaaagccgtcttcttcaagcccgtactggctggaacgagcaggacattgttagccgcgtgcaggcgtatatcaccacgcaaggttcggctggagccgtggtacatacaccggagaagacctacgatattccggctgctaaaactcgtcgtgtcgttgatccaactggttgcggcgacgcgtttcgcgccggcctgatctatggtattcagcatgaatatgattggttgaccattggccgcatgggaaacttaatgggtgcgctgaaagtggaacaccctggcacccaaaatcagcgtttcgattttgccgaattcaacgaccagttcaaacaatattttggctacgcgctc

SEQ ID NO: 1692 - protein, 321 aa, synthetic construct
  REGION 1..321: note = variant of adenosine kinase from Xanthemonas campestris
MHHHHHHGGSGMSALICGSLAYDNIMVFPDYFKNHILPDRVHRLNVSFLVFDMRREFGGCAGNIAYNLHLLGGRPIVMATVGQDFGPYREHFETLGIDLSRVKIIDDLSTPQGFITTDMDQNQITAFHSGAMMRSYENHVRDVPGVTLGLVGPDGREGMIQNAEEFAAMGIPFIFDPGQAVPLFSGPELREFIEQADYVVVNDYESRLLQARTGWNEQDIVSRVQAYITTQGSAGAVVHTPEKTYDIPAAKTRRVVDPTGCGDAFRAGLIYGIQHEYDWLTIGRMGNLMGALKVEHPGTQNQRFDFAEFNDQFKQYFGYAL

SEQ ID NO: 1693 - DNA, 963 bp, synthetic construct
  misc_feature 1..963: note = variant of adenosine kinase from Xanthemonas campestris
  source 1..963: mol_type = other DNA
atgcatcatcaccatcaccatggggggtccggtatgagtgcactcatttgcggttctttagcgtatgataacatcatggtgtttccggactatttcaagaaccatattctgcccgatcgtgttcaccgcctcaatgtcagctttctggtatttgacatgcgtcgtgaatttggaggctgtgccggcaacattgcgtacaatctgcatctgttgggtggtgccccgatcgtaatggctacggtgggccaagatttcggtccgtatcgcgaacacttcgaaactctgggcattgacttatcccgcgtcaagatcatcgatgatctgagtacaccgcaggggttcattaccaccgacatggatcaaaaccagattacggcgtttcacagcggcgcaatgatgcgttcgtacgaaaatcacgttcgtgatgtgccgggtgttaccttgggcctcgtaggtcctgatggacgcgagggcatgatccaaaatgccgaagaatttgctgctatgggcattccgttcatttttgacccaggtcaggcagtgcctctgttcagcggcccggaactgcgcgaatttatcgaacaggcggactatgtggtggtcaacgattacgaaagcatgcttcttcaagcccgtactggctggaacgagcaggacattgttagccgcgtgcaggcgtatatcaccacgcaaggttcggctggagccgtggtacatacaccggagaagcgctacgttattccggctgctaaaactcgtcgtgtcgttgatccaactggttgcggcgacgcgtttcgcgccggcctgatctatggtattcagcatgaatatgattggttgaccattggccgcatgggaaacttaatgggtgcgctgaaagtggaacaccctggcacccaaaatcagcgtttcgattttgccgaattcaacgaccagttcaaacaatattttggctacgcgctc

SEQ ID NO: 1694 - protein, 321 aa, synthetic construct
  REGION 1..321: note = variant of adenosine kinase from Xanthemonas campestris
MHHHHHHGGSGMSALICGSLAYDNIMVFPDYFKNHILPDRVHRLNVSFLVFDMRREFGGCAGNIAYNLHLLGGAPIVMATVGQDFGPYREHFETLGIDLSRVKIIDDLSTPQGFITTDMDQNQITAFHSGAMMRSYENHVRDVPGVTLGLVGPDGREGMIQNAEEFAAMGIPFIFDPGQAVPLFSGPELREFIEQADYVVVNDYESMLLQARTGWNEQDIVSRVQAYITTQGSAGAVVHTPEKRYVIPAAKTRRVVDPTGCGDAFRAGLIYGIQHEYDWLTIGRMGNLMGALKVEHPGTQNQRFDFAEFNDQFKQYFGYAL

SEQ ID NO: 1695 - DNA, 963 bp, synthetic construct
  misc_feature 1..963: note = variant of adenosine kinase from Xanthemonas campestris
  source 1..963: mol_type = other DNA
atgcatcatcaccatcaccatggggggtccggtatgagtgcactcatttgcggttctttagcgtatgataacatcatggtgtttccggactatttcaagaaccatattctgcccgatcgtgttcaccgcctcaatgtcagctttctggtatttgacctgcgtcgtgaatttggaggctgtgccggcaacattgcgtacaatctgcatctgttgggtggtgccccgatcgtaatggctacggtgggccaagatttcggtccgtatcgcgaacacttcgaaactctgggcattgacttatcccgcgtcaagatcatcgatgatctgagtacaccgcaggggttcattaccaccgacatggatcaaaaccagattacggcgtttcacagcggcgcaatgatgcgttcgtacgaaaatcacgttcgtgatgtgccgggtgttaccttgggcctcgtaggtcctgatggacgcgagggcatgatccaaaatgccgaagaatttgctgctatgggcattccgttcatttttgacccaggtcaggcagtgcctctgttcagcggcccggaactgcgcgaatttatcgaacaggcggactatgtggtggtcaacgattacgaaagccgtcttcttcaagcccgtactggctggaacgagcaggacattgttagccgcgtgcaggcgtatatcaccacgcaaggttcggctggagccgtggtaatgacaccggagaagcgctacgttattccggctgctaaaactcgtcgtgtcgttgatccaactggttgcggcgacgcgtttcgcgccggcctgatctatggtattcagcatgaatatgattggttgaccattggccgcatgggaaacttaatgggtgcgctgaaagtggaacaccctggcacccaaaatcagcgtttcgattttgccgaattcaacgaccagttcaaacaatattttggctacgcgctc

SEQ ID NO: 1696 - protein, 321 aa, synthetic construct
  REGION 1..321: note = variant of adenosine kinase from Xanthemonas campestris
MHHHHHHGGSGMSALICGSLAYDNIMVFPDYFKNHILPDRVHRLNVSFLVFDLRREFGGCAGNIAYNLHLLGGAPIVMATVGQDFGPYREHFETLGIDLSRVKIIDDLSTPQGFITTDMDQNQITAFHSGAMMRSYENHVRDVPGVTLGLVGPDGREGMIQNAEEFAAMGIPFIFDPGQAVPLFSGPELREFIEQADYVVVNDYESRLLQARTGWNEQDIVSRVQAYITTQGSAGAVVMTPEKRYVIPAAKTRRVVDPTGCGDAFRAGLIYGIQHEYDWLTIGRMGNLMGALKVEHPGTQNQRFDFAEFNDQFKQYFGYAL

SEQ ID NO: 1697 - DNA, 963 bp, synthetic construct
  misc_feature 1..963: note = variant of adenosine kinase from Xanthemonas campestris
  source 1..963: mol_type = other DNA
atgcatcatcaccatcaccatggggggtccggtatgagtgcactcatttgcggttctttagcgtatgataacatcatggtgtttccggactatttcaagaaccatattctgcccgatcgtgttcaccgcctcaatgtcagctttctggtatttgacatgcgtcgtgaatttggaggctgtgccggcaacattgcgtacaatctgcatctgttgggtggtgccccgatcgtaatggctacggtgggccaagatttcggtccgtatcgcgaacacttcgaaactctgggcattgacttatcccgcgtcaagatcatcgatgatctgagtacaccgcaggggttcattaccaccgacatggatcaaaaccagattacggcgtttcacagcggcgcaatgatgcgttcgtacgaaaatcacgttcgtgatgtgccgggtgttaccttgggcctcgtaggtcctgatggacgcgagggcatgatccaaaatgccgaagaatttgctgctatgggcattccgttcatttttgacccaggtcaggcagtgcctctgttcagcggcccggaactgcgcgaatttatcgaacaggcggactatgtggtggtcaacgattacgaaagccgtcttcttcaagcccgtactggctggaacgagcaggacattgttagccgcgtgcaggcgtatatcaccacgcaaggttcggctggagccgtggtacatacaccggagaagacctacgatattccggctgctaaaactcgtcgtgtcgttgatccaactggttgcggcgacgcgtttcgcgccggcctgatctatggtattcagcatgaatatgattggttgaccattggccgcatgggaaacttaatgggtgcgctgaaagtggaacaccctggcacccaaaatcagcgtttcgattttgccgaattcaacgaccagttcaaacaatattttggctacgcgctc

SEQ ID NO: 1698 - protein, 321 aa, synthetic construct
  REGION 1..321: note = variant of adenosine kinase from Xanthemonas campestris
MHHHHHHGGSGMSALICGSLAYDNIMVFPDYFKNHILPDRVHRLNVSFLVFDMRREFGGCAGNIAYNLHLLGGAPIVMATVGQDFGPYREHFETLGIDLSRVKIIDDLSTPQGFITTDMDQNQITAFHSGAMMRSYENHVRDVPGVTLGLVGPDGREGMIQNAEEFAAMGIPFIFDPGQAVPLFSGPELREFIEQADYVVVNDYESRLLQARTGWNEQDIVSRVQAYITTQGSAGAVVHTPEKTYDIPAAKTRRVVDPTGCGDAFRAGLIYGIQHEYDWLTIGRMGNLMGALKVEHPGTQNQRFDFAEFNDQFKQYFGYAL

SEQ ID NO: 1699 - DNA, 963 bp, synthetic construct
  misc_feature 1..963: note = variant of adenosine kinase from Xanthemonas campestris
  source 1..963: mol_type = other DNA
atgcatcatcaccatcaccatggggggtccggtatgagtgcactcatttgcggttctttagcgtatgataacatcatggtgtttccggacctgttcaagaaccatattctgcccgatcgtgttcaccgcctcaatgtcagctttctggtatttgacctgcgtcgtgaatttggaggctgtgccggcaacattgcgtacaatctgcatctgttgggtggtaccccgatcgtaatggctacggtgggccaagatttcggtccgtatcgcgaacacttcgaaactctgggcattgacttatcccgcgtcaagatcatcgatgatctgagtacaccgcaggggttcattaccaccgacatggatcaaaaccagattacggcgtttcacagcggcgcaatgatgcgttcgtacgaaaatcacgttcgtgatgtgccgggtgttaccttgggcctcgtaggtcctgatggacgcgagggcatgatccaaaatgccgaagaatttgctgctatgggcattccgttcatttttgacccaggtcaggcagtgcctctgttcagcggcccggaactgcgcgaatttatcgaacaggcggactatgtggtggtcaacgattacgaaagccgccttcttcaagcccgtactggctggaacgagcaggacattgttagccgcgtgcaggcgtatatcaccacgcaaggttcggctggagccgtggtaatgacaccggagaagacctacagcattccggctgctaaaactcgtcgtgtcgttgatccaactggttgcggcgacgcgtttcgcgccggcctgatctatggtattcagcatgaatatgattggttgaccattggccgcatgggaaacttaatgggtgcgctgaaagtggaacaccctggcacccaaaatcagcgtttcgattttgccgaattcaacgaccagttcaaacaatattttggctacgcgctc

SEQ ID NO: 1700 - protein, 321 aa, synthetic construct
  REGION 1..321: note = variant of adenosine kinase from Xanthemonas campestris
MHHHHHHGGSGMSALICGSLAYDNIMVFPDLFKNHILPDRVHRLNVSFLVFDLRREFGGCAGNIAYNLHLLGGTPIVMATVGQDFGPYREHFETLGIDLSRVKIIDDLSTPQGFITTDMDQNQITAFHSGAMMRSYENHVRDVPGVTLGLVGPDGREGMIQNAEEFAAMGIPFIFDPGQAVPLFSGPELREFIEQADYVVVNDYESRLLQARTGWNEQDIVSRVQAYITTQGSAGAVVMTPEKTYSIPAAKTRRVVDPTGCGDAFRAGLIYGIQHEYDWLTIGRMGNLMGALKVEHPGTQNQRFDFAEFNDQFKQYFGYAL

SEQ ID NO: 1701 - DNA, 963 bp, synthetic construct
  misc_feature 1..963: note = variant of adenosine kinase from Xanthemonas campestris
  source 1..963: mol_type = other DNA
atgcatcatcaccatcaccatggggggtccggtatgagtgcactcatttgcggttctttagcgtatgataacatcatggtgtttccggactatttcaagaaccatattctgcccgatcgtgttcaccgcctcaatgtcagctttctggtatttgacatgcgtcgtgaatttggaggctgtgccggcaacattgcgtacaatctgcatctgttgggtggtcgcccgatcgtaatggctacggtgggccaagatttcggtccgtatcgcgaacacttcgaaactctgggcattgacttatcccgcgtcaagatcatcgatgatctgagtacaccgcaggggttcattaccaccgacatggatcaaaaccagattacggcgtttcacagcggcgcaatgatgcgttcgtacgaaaatcacgttcgtgatgtgccgggtgttaccttgggcctcgtaggtcctgatggacgcgagggcatgatccaaaatgccgaagaatttgctgctatgggcattccgttcatttttgacccaggtcaggcagtgcctctgttcagcggcccggaactgcgcgaatttatcgaacaggcggactatgtggtggtcaacgattacgaaagcatgcttcttcaagcccgtactggctggaacgagcaggacattgttagccgcgtgcaggcgtatatcaccacgcaaggttcggctggagccgtggtacatacaccggagaagacctacgatattccggctgctaaaactcgtcgtgtcgttgatccaactggttgcggcgacgcgtttcgcgccggcctgatctatggtattcagcatgaatatgattggttgaccattggccgcatgggaaacttaatgggtgcgctgaaagtggaacaccctggcacccaaaatcagcgtttcgattttgccgaattcaacgaccagttcaaacaatattttggctacgcgctc

SEQ ID NO: 1702 - protein, 321 aa, synthetic construct
  REGION 1..321: note = variant of adenosine kinase from Xanthemonas campestris
MHHHHHHGGSGMSALICGSLAYDNIMVFPDYFKNHILPDRVHRLNVSFLVFDMRREFGGCAGNIAYNLHLLGGRPIVMATVGQDFGPYREHFETLGIDLSRVKIIDDLSTPQGFITTDMDQNQITAFHSGAMMRSYENHVRDVPGVTLGLVGPDGREGMIQNAEEFAAMGIPFIFDPGQAVPLFSGPELREFIEQADYVVVNDYESMLLQARTGWNEQDIVSRVQAYITTQGSAGAVVHTPEKTYDIPAAKTRRVVDPTGCGDAFRAGLIYGIQHEYDWLTIGRMGNLMGALKVEHPGTQNQRFDFAEFNDQFKQYFGYAL

SEQ ID NO: 1703 - DNA, 963 bp, synthetic construct
  misc_feature 1..963: note = variant of adenosine kinase from Xanthemonas campestris
  source 1..963: mol_type = other DNA
atgcatcatcaccatcaccatggggggtccggtatgagtgcactcatttgcggttctttagcgtatgataacatcatggtgtttccggactatttcaagaaccatattctgcccgatcgtgttcaccgcctcaatgtcagctttctggtatttgacatgcgtcgtgaatttggaggctgtgccggcaacattgcgtacaatctgcatctgttgggtggtgctccgatcgtaatggctacggtgggccaagatttcggtccgtatcgcgaacacttcgaaactctgggcattgacttatcccgcgtcaagatcatcgatgatctgagtacaccgcaggggttcattaccaccgacatggatcaaaaccagattacggcgtttcacagcggcgcaatgatgcgttcgtacgaaaatcacgttcgtgatgtgccgggtgttaccttgggcctcgtaggtcctgatggacgcgagggcatgatccaaaatggcgaagaatttgctgctatgggcattccgttcatttttgacccaggtcaggcagtgcctctgttcagcggcccggaactgcgcgaatttatcgaacaggcggactatgtggtggtcaacgattacgaaagcatgcttcttcaagcccgtactggctggaacgagcaggacattgttagccgcgtgcaggcgtatatcaccacgcaaggttcggctggagccgtggtacatacaccggagaagcgctacgatattccggctgctaaaactcgtcgtgtcgttgatccaactggttgcggcgacgcgtttcgcgccggcctgatctatggtattcagcatgaatatgattggttgaccattggccgcatgggaaacttaatgggtgcgctgaaagtggaacaccctggcacccaaaatcagcgtttcgattttgccgaattcaacgaccagttcaaacaatattttggctacgcgctc

SEQ ID NO: 1704 - protein, 321 aa, synthetic construct
  REGION 1..321: note = variant of adenosine kinase from Xanthemonas campestris
MHHHHHHGGSGMSALICGSLAYDNIMVFPDYFKNHILPDRVHRLNVSFLVFDMRREFGGCAGNIAYNLHLLGGAPIVMATVGQDFGPYREHFETLGIDLSRVKIIDDLSTPQGFITTDMDQNQITAFHSGAMMRSYENHVRDVPGVTLGLVGPDGREGMIQNGEEFAAMGIPFIFDPGQAVPLFSGPELREFIEQADYVVVNDYESMLLQARTGWNEQDIVSRVQAYITTQGSAGAVVHTPEKRYDIPAAKTRRVVDPTGCGDAFRAGLIYGIQHEYDWLTIGRMGNLMGALKVEHPGTQNQRFDFAEFNDQFKQYFGYAL

SEQ ID NO: 1705 - DNA, 963 bp, synthetic construct
  misc_feature 1..963: note = variant of adenosine kinase from Xanthemonas campestris
  source 1..963: mol_type = other DNA
atgcatcatcaccatcaccatggggggtccggtatgagtgcactcatttgcggttctttagcgtatgataacatcatggtgtttccggaccggttcaagaaccatattctgcccgatcgtgttcaccgcctcaatgtcagctttctggtatttgacatgcgtcgtgaatttggaggctgtgccggcaacattgcgtacaatctgcatctgttgggtggtgccccgatcgtaatggctacggtgggccaagatttcggtccgtatcgcgaacacttcgaaactctgggcattgacttatcccgcgtcaagatcatcgatgatctgagtacaccgcaggggttcattaccaccgacatggatcaaaaccagattacggcgtttcacagcggcgcaatgatgcgttcgtacgaaaatcacgttcgtgatgtgccgggtgttaccttgggcctcgtaggtcctgatggacgcgagggcatgatccaaaatgccgaagaatttgctgctatgggcattccgttcatttttgacccaggtcaggcagtgcctctgttcagcggcccggaactgcgcgaatttatcgaacaggcggactatgtggtggtcaacgattacgaaagcatgcttcttcaagcccgtactggctggaacgagcaggacattgttagccgcgtgcaggcgtatatcaccacgcaaggttcggctggagccgtggtacatacaccggagaagcgctacgttattccggctgctaaaactcgtcgtgtcgttgatccaactggttgcggcgacgcgtttcgcgccggcctgatctatggtattcagcatgaatatgattggttgaccattggccgcatgggaaacttaatgggtgcgctgaaagtggaacaccctggcacccaaaatcagcgtttcgattttgccgaattcaacgaccagttcaaacaatattttggctacgcgctc

SEQ ID NO: 1706 - protein, 321 aa, synthetic construct
  REGION 1..321: note = variant of adenosine kinase from Xanthemonas campestris
MHHHHHHGGSGMSALICGSLAYDNIMVFPDRFKNHILPDRVHRLNVSFLVFDMRREFGGCAGNIAYNLHLLGGAPIVMATVGQDFGPYREHFETLGIDLSRVKIIDDLSTPQGFITTDMDQNQITAFHSGAMMRSYENHVRDVPGVTLGLVGPDGREGMIQNAEEFAAMGIPFIFDPGQAVPLFSGPELREFIEQADYVVVNDYESMLLQARTGWNEQDIVSRVQAYITTQGSAGAVVHTPEKRYVIPAAKTRRVVDPTGCGDAFRAGLIYGIQHEYDWLTIGRMGNLMGALKVEHPGTQNQRFDFAEFNDQFKQYFGYAL

SEQ ID NO: 1707 - DNA, 963 bp, synthetic construct
  misc_feature 1..963: note = variant of adenosine kinase from Xanthemonas campestris
  source 1..963: mol_type = other DNA
atgcatcatcaccatcaccatggggggtccggtatgagtgcactcatttgcggttctttagcgtatgataacatcatggtgtttccggactatttcaagaaccatattctgcccgatcgtgttcaccgcctcaatgtcagctttctggtatttgacctgcgtcgtgaatttggaggctgtgccggcaacattgcgtacaatctgcatctgttgggtggtgccccgatcgtaatggctacggtgggccaagatttcggtccgtatcgcgaacacttcgaaactctgggcattgacttatcccgcgtcaagatcatcgatgatctgagtacaccgcaggggttcattaccaccgacatggatcaaaaccagattacggcgtttcacagcggcgcaatgatgcgttcgtacgaaaatcacgttcgtgatgtgccgggtgttaccttgggcctcgtaggtcctgatggacgcgagggcatgatccaaaatgccgaagaatttgctgctatgggcattccgttcatttttgacccaggtcaggcagtgcctctgttcagcggcccggaactgcgcgaatttatcgaacaggcggactatgtggtggtcaacgattacgaaagccgtcttcttcaagcccgtactggctggaacgagcaggacattgttagccgcgtgcaggcgtatatcaccacgcaaggttcggctggagccgtggtacatacaccggagaagcgctacgatattccggctgctaaaactcgtcgtgtcgttgatccaactggttgcggcgacgcgtttcgcgccggcctgatctatggtattcagcatgaatatgattggttgaccattggccgcatgggaaacttaatgggtgcgctgaaagtggaacaccctggcacccaaaatcagcgtttcgattttgccgaattcaacgaccagttcaaacaatattttggctacgcgctc

SEQ ID NO: 1708 - protein, 321 aa, synthetic construct
  REGION 1..321: note = variant of adenosine kinase from Xanthemonas campestris
MHHHHHHGGSGMSALICGSLAYDNIMVFPDYFKNHILPDRVHRLNVSFLVFDLRREFGGCAGNIAYNLHLLGGAPIVMATVGQDFGPYREHFETLGIDLSRVKIIDDLSTPQGFITTDMDQNQITAFHSGAMMRSYENHVRDVPGVTLGLVGPDGREGMIQNAEEFAAMGIPFIFDPGQAVPLFSGPELREFIEQADYVVVNDYESRLLQARTGWNEQDIVSRVQAYITTQGSAGAVVHTPEKRYDIPAAKTRRVVDPTGCGDAFRAGLIYGIQHEYDWLTIGRMGNLMGALKVEHPGTQNQRFDFAEFNDQFKQYFGYAL

SEQ ID NO: 1709 - DNA, 963 bp, synthetic construct
  misc_feature 1..963: note = variant of adenosine kinase from Xanthemonas campestris
  source 1..963: mol_type = other DNA
atgcatcatcaccatcaccatggggggtccggtatgagtgcactcatttgcggttctttagcgtatgataacatcatggtgtttccggactatttcaagaaccatattctgcccgatcgtgttcaccgcctcaatgtcagctttctggtatttgacatgcgtcgtgaatttggaggctgtgccggcaacattgcgtacaatctgcatctgttgggtggtgctccgatcgtaatggctacggtgggccaagatttcggtccgtatcgcgaacacttcgaaactctgggcattgacttatcccgcgtcaagatcatcgatgatctgagtacaccgcaggggttcattaccaccgacatggatcaaaaccagattacggcgtttcacagcggcgcaatgatgcgttcgtacgaaaatcacgttcgtgatgtgccgggtgttaccttgggcctcgtaggtcctgatggacgcgagggcatgatccaaaatggcgaagaatttgctgctatgggcattccgttcatttttgacccaggtcaggcagtgcctctgttcagcggcccggaactgcgcgaatttatcgaacaggcggactatgtggtggtcaacgattacgaaagccgtcttcttcaagcccgtactggctggaacgagcaggacattgttagccgcgtgcaggcgtatatcaccacgcaaggttcggctggagccgtggtacatacaccggagaagacctacgatattccggctgctaaaactcgtcgtgtcgttgatccaactggttgcggcgacgcgtttcgcgccggcctgatctatggtattcagcatgaatatgattggttgaccattggccgcatgggaaacttaatgggtgcgctgaaagtggaacaccctggcacccaaaatcagcgtttcgattttgccgaattcaacgaccagttcaaacaatattttggctacgcgctc

SEQ ID NO: 1710 - protein, 321 aa, synthetic construct
  REGION 1..321: note = variant of adenosine kinase from Xanthemonas campestris
MHHHHHHGGSGMSALICGSLAYDNIMVFPDYFKNHILPDRVHRLNVSFLVFDMRREFGGCAGNIAYNLHLLGGAPIVMATVGQDFGPYREHFETLGIDLSRVKIIDDLSTPQGFITTDMDQNQITAFHSGAMMRSYENHVRDVPGVTLGLVGPDGREGMIQNGEEFAAMGIPFIFDPGQAVPLFSGPELREFIEQADYVVVNDYESRLLQARTGWNEQDIVSRVQAYITTQGSAGAVVHTPEKTYDIPAAKTRRVVDPTGCGDAFRAGLIYGIQHEYDWLTIGRMGNLMGALKVEHPGTQNQRFDFAEFNDQFKQYFGYAL

SEQ ID NO: 1711 - DNA, 963 bp, synthetic construct
  misc_feature 1..963: note = variant of adenosine kinase from Xanthemonas campestris
  source 1..963: mol_type = other DNA
atgcatcatcaccatcaccatggggggtccggtatgagtgcactcatttgcggttctttagcgtatgataacatcatggtgtttccggaccggttcaagaaccatattctgcccgatcgtgttcaccgcctcaatgtcagctttctggtatttgacatgcgtcgtgaatttggaggctgtgccggcaacattgcgtacaatctgcatctgttgggtggtgccccgatcgtaatggctacggtgggccaagatttcggtccgtatcgcgaacacttcgaaactctgggcattgacttatcccgcgtcaagatcatcgatgatctgagtacaccgcaggggttcattaccaccgacatggatcaaaaccagattacggcgtttcacagcggcgcaatgatgcgttcgtacgaaaatcacgttcgtgatgtgccgggtgttaccttgggcctcgtaggtcctgatggacgcgagggcatgatccaaaatgccgaagaatttgctgctatgggcattccgttcatttttgacccaggtcaggcagtgcctctgttcagcggcccggaactgcgcgaatttatcgaacaggcggactatgtggtggtcaacgattacgaaagccgccttcttcaagcccgtactggctggaacgagcaggacattgttagccgcgtgcaggcgtatatcaccacgcaaggttcggctggagccgtggtacatacaccggagaagacctacgatattccggctgctaaaactcgtcgtgtcgttgatccaactggttgcggcgacgcgtttcgcgccggcctgatctatggtattcagcatgaatatgattggttgaccattggccgcatgggaaacttaatgggtgcgctgaaagtggaacaccctggcacccaaaatcagcgtttcgattttgccgaattcaacgaccagttcaaacaatattttggctacgcgctc

SEQ ID NO: 1712 - protein, 321 aa, synthetic construct
  REGION 1..321: note = variant of adenosine kinase from Xanthemonas campestris
MHHHHHHGGSGMSALICGSLAYDNIMVFPDRFKNHILPDRVHRLNVSFLVFDMRREFGGCAGNIAYNLHLLGGAPIVMATVGQDFGPYREHFETLGIDLSRVKIIDDLSTPQGFITTDMDQNQITAFHSGAMMRSYENHVRDVPGVTLGLVGPDGREGMIQNAEEFAAMGIPFIFDPGQAVPLFSGPELREFIEQADYVVVNDYESRLLQARTGWNEQDIVSRVQAYITTQGSAGAVVHTPEKTYDIPAAKTRRVVDPTGCGDAFRAGLIYGIQHEYDWLTIGRMGNLMGALKVEHPGTQNQRFDFAEFNDQFKQYFGYAL

SEQ ID NO: 1713 - DNA, 963 bp, synthetic construct
  misc_feature 1..963: note = variant of adenosine kinase from Xanthemonas campestris
  source 1..963: mol_type = other DNA
atgcatcatcaccatcaccatggggggtccggtatgagtgcactcatttgcggttctttagcgtatgataacatcatggtgtttccggaccggttcaagaaccatattctgcccgatcgtgttcaccgcctcaatgtcagctttctggtatttgacctgcgtcgtgaatttggaggctgtgccggcaacattgcgtacaatctgcatctgttgggtggtgctccgatcgtaatggctacggtgggccaagatttcggtccgtatcgcgaacacttcgaaactctgggcattgacttatcccgcgtcaagatcatcgatgatctgagtacaccgcaggggttcattaccaccgacatggatcaaaaccagattacggcgtttcacagcggcgcaatgatgcgttcgtacgaaaatcacgttcgtgatgtgccgggtgttaccttgggcctcgtaggtcctgatggacgcgagggcatgatccaaaatgccgaagaatttgctgctatgggcattccgttcatttttgacccaggtcaggcagtgcctctgttcagcggcccggaactgcgcgaatttatcgaacaggcggactatgtggtggtcaacgattacgaaagccgtcttcttcaagcccgtactggctggaacgagcaggacattgttagccgcgtgcaggcgtatatcaccacgcaaggttcggctggagccgtggtaatgacaccggagaagacctacagcattccggctgctaaaactcgtcgtgtcgttgatccaactggttgcggcgacgcgtttcgcgccggcctgatctatggtattcagcatgaatatgattggttgaccattggccgcatgggaaacttaatgggtgcgctgaaagtggaacaccctggcacccaaaatcagcgtttcgattttgccgaattcaacgaccagttcaaacaatattttggctacgcgctc

SEQ ID NO: 1714 - protein, 321 aa, synthetic construct
  REGION 1..321: note = variant of adenosine kinase from Xanthemonas campestris
MHHHHHHGGSGMSALICGSLAYDNIMVFPDRFKNHILPDRVHRLNVSFLVFDLRREFGGCAGNIAYNLHLLGGAPIVMATVGQDFGPYREHFETLGIDLSRVKIIDDLSTPQGFITTDMDQNQITAFHSGAMMRSYENHVRDVPGVTLGLVGPDGREGMIQNAEEFAAMGIPFIFDPGQAVPLFSGPELREFIEQADYVVVNDYESRLLQARTGWNEQDIVSRVQAYITTQGSAGAVVMTPEKTYSIPAAKTRRVVDPTGCGDAFRAGLIYGIQHEYDWLTIGRMGNLMGALKVEHPGTQNQRFDFAEFNDQFKQYFGYAL

SEQ ID NO: 1715 - DNA, 963 bp, synthetic construct
  misc_feature 1..963: note = variant of adenosine kinase from Xanthemonas campestris
  source 1..963: mol_type = other DNA
atgcatcatcaccatcaccatggggggtccggtatgagtgcactcatttgcggttctttagcgtatgataacatcatggtgtttccggaccagttcaagaaccatattctgcccgatcgtgttcaccgcctcaatgtcagctttctggtatttgacatgcgtcgtgaatttggaggctgtgccggcaacattgcgtacaatctgcatctgttgggtggtaccccgatcgtaatggctacggtgggccaagatttcggtccgtatcgcgaacacttcgaaactctgggcattgacttatcccgcgtcaagatcatcgatgatctgagtacaccgcaggggttcattaccaccgacatggatcaaaaccagattacggcgtttcacagcggcgcaatgatgcgttcgtacgaaaatcacgttcgtgatgtgccgggtgttaccttgggcctcgtaggtcctgatggacgcgagggcatgatccaaaatgccgaagaatttgctgctatgggcattccgttcatttttgacccaggtcaggcagtgcctctgttcagcggcccggaactgcgcgaatttatcgaacaggcggactatgtggtggtcaacgattacgaaagcatgcttcttcaagcccgtactggctggaacgagcaggacattgttagccgcgtgcaggcgtatatcaccacgcaaggttcggctggagccgtggtaatgacaccggagaagcgctacgatattccggctgctaaaactcgtcgtgtcgttgatccaactggttgcggcgacgcgtttcgcgccggcctgatctatggtattcagcatgaatatgattggttgaccattggccgcatgggaaacttaatgggtgcgctgaaagtggaacaccctggcacccaaaatcagcgtttcgattttgccgaattcaacgaccagttcaaacaatattttggctacgcgctc

SEQ ID NO: 1716 - protein, 321 aa, synthetic construct
  REGION 1..321: note = variant of adenosine kinase from Xanthemonas campestris
MHHHHHHGGSGMSALICGSLAYDNIMVFPDQFKNHILPDRVHRLNVSFLVFDMRREFGGCAGNIAYNLHLLGGTPIVMATVGQDFGPYREHFETLGIDLSRVKIIDDLSTPQGFITTDMDQNQITAFHSGAMMRSYENHVRDVPGVTLGLVGPDGREGMIQNAEEFAAMGIPFIFDPGQAVPLFSGPELREFIEQADYVVVNDYESMLLQARTGWNEQDIVSRVQAYITTQGSAGAVVMTPEKRYDIPAAKTRRVVDPTGCGDAFRAGLIYGIQHEYDWLTIGRMGNLMGALKVEHPGTQNQRFDFAEFNDQFKQYFGYAL

SEQ ID NO: 1717 - DNA, 963 bp, synthetic construct
  misc_feature 1..963: note = variant of adenosine kinase from Xanthemonas campestris
  source 1..963: mol_type = other DNA
atgcatcatcaccatcaccatggggggtccggtatgagtgcactcatttgcggttctttagcgtatgataacatcatggtgtttccggacctgttcaagaaccatattctgcccgatcgtgttcaccgcctcaatgtcagctttctggtatttgacatgcgtcgtgaatttggaggctgtgccggcaacattgcgtacaatctgcatctgttgggtggtgctccgatcgtaatggctacggtgggccaagatttcggtccgtatcgcgaacacttcgaaactctgggcattgacttatcccgcgtcaagatcatcgatgatctgagtacaccgcaggggttcattaccaccgacatggatcaaaaccagattacggcgtttcacagcggcgcaatgatgcgttcgtacgaaaatcacgttcgtgatgtgccgggtgttaccttgggcctcgtaggtcctgatggacgcgagggcatgatccaaaatggccaagaatttgctgctatgggcattccgttcatttttgacccaggtcaggcagtgcctctgttcagcggcccggaactgcgcgaatttatcgaacaggcggactatgtggtggtcaacgattacgaaagcatgcttcttcaagcccgtactggctggaacgagcaggacattgttagccgcgtgcaggcgtatatcaccacgcaaggttcggctggagccgtggtaatgacaccggagaagcgctacgttattccggctgctaaaactcgtcgtgtcgttgatccaactggttgcggcgacgcgtttcgcgccggcctgatctatggtattcagcatgaatatgattggttgaccattggccgcatgggaaacttaatgggtgcgctgaaagtggaacaccctggcacccaaaatcagcgtttcgattttgccgaattcaacgaccagttcaaacaatattttggctacgcgctc

SEQ ID NO: 1718 - protein, 321 aa, synthetic construct
  REGION 1..321: note = variant of adenosine kinase from Xanthemonas campestris
MHHHHHHGGSGMSALICGSLAYDNIMVFPDLFKNHILPDRVHRLNVSFLVFDMRREFGGCAGNIAYNLHLLGGAPIVMATVGQDFGPYREHFETLGIDLSRVKIIDDLSTPQGFITTDMDQNQITAFHSGAMMRSYENHVRDVPGVTLGLVGPDGREGMIQNGQEFAAMGIPFIFDPGQAVPLFSGPELREFIEQADYVVVNDYESMLLQARTGWNEQDIVSRVQAYITTQGSAGAVVMTPEKRYVIPAAKTRRVVDPTGCGDAFRAGLIYGIQHEYDWLTIGRMGNLMGALKVEHPGTQNQRFDFAEFNDQFKQYFGYAL

SEQ ID NO: 1719 - DNA, 963 bp, synthetic construct
  misc_feature 1..963: note = variant of adenosine kinase from Xanthemonas campestris
  source 1..963: mol_type = other DNA
atgcatcatcaccatcaccatggggggtccggtatgagtgcactcatttgcggttctttagcgtatgataacatcatggtgtttccggaccagttcaagaaccatattctgcccgatcgtgttcaccgcctcaatgtcagctttctggtatttgacatgcgtcgtgaatttggaggctgtgccggcaacattgcgtacaatctgcatctgttgggtggtaccccgatcgtaatggctacggtgggccaagatttcggtccgtatcgcgaacacttcgaaactctgggcattgacttatcccgcgtcaagatcatcgatgatctgagtacaccgcaggggttcattaccaccgacatggatcaaaaccagattacggcgtttcacagcggcgcaatgatgcgttcgtacgaaaatcacgttcgtgatgtgccgggtgttaccttgggcctcgtaggtcctgatggacgcgagggcatgatccaaaatgccgaagaatttgctgctatgggcattccgttcatttttgacccaggtcaggcagtgcctctgttcagcggcccggaactgcgcgaatttatcgaacaggcggactatgtggtggtcaacgattacgaaagcatgcttcttcaagcccgtactggctggaacgagcaggacattgttagccgcgtgcaggcgtatatcaccacgcaaggttcggctggagccgtggtacatacaccggagaagacctacgatattccggctgctaaaactcgtcgtgtcgttgatccaactggttgcggcgacgcgtttcgcgccggcctgatctatggtattcagcatgaatatgattggttgaccattggccgcatgggaaacttaatgggtgcgctgaaagtggaacaccctggcacccaaaatcagcgtttcgattttgccgaattcaacgaccagttcaaacaatattttggctacgcgctc

SEQ ID NO: 1720 - protein, 321 aa, synthetic construct
  REGION 1..321: note = variant of adenosine kinase from Xanthemonas campestris
MHHHHHHGGSGMSALICGSLAYDNIMVFPDQFKNHILPDRVHRLNVSFLVFDMRREFGGCAGNIAYNLHLLGGTPIVMATVGQDFGPYREHFETLGIDLSRVKIIDDLSTPQGFITTDMDQNQITAFHSGAMMRSYENHVRDVPGVTLGLVGPDGREGMIQNAEEFAAMGIPFIFDPGQAVPLFSGPELREFIEQADYVVVNDYESMLLQARTGWNEQDIVSRVQAYITTQGSAGAVVHTPEKTYDIPAAKTRRVVDPTGCGDAFRAGLIYGIQHEYDWLTIGRMGNLMGALKVEHPGTQNQRFDFAEFNDQFKQYFGYAL

SEQ ID NO: 1721 - DNA, 963 bp, synthetic construct
  misc_feature 1..963: note = variant of adenosine kinase from Xanthemonas campestris
  source 1..963: mol_type = other DNA
atgcatcatcaccatcaccatggggggtccggtatgagtgcactcatttgcggttctttagcgtatgataacatcatggtgtttccggactatttcaagaaccatattctgcccgatcgtgttcaccgcctcaatgtcagctttctggtatttgacatgcgtcgtgaatttggaggctgtgccggcaacattgcgtacaatctgcatctgttgggtggtgccccgatcgtaatggctacggtgggccaagatttcggtccgtatcgcgaacacttcgaaactctgggcattgacttatcccgcgtcaagatcatcgatgatctgagtacaccgcaggggttcattaccaccgacatggatcaaaaccagattacggcgtttcacagcggcgcaatgatgcgttcgtacgaaaatcacgttcgtgatgtgccgggtgttaccttgggcctcgtaggtcctgatggacgcgagggcatgatccaaaatggcgaagaatttgctgctatgggcattccgttcatttttgacccaggtcaggcagtgcctctgttcagcggcccggaactgcgcgaatttatcgaacaggcggactatgtggtggtcaacgattacgaaagcatgcttcttcaagcccgtactggctggaacgagcaggacattgttagccgcgtgcaggcgtatatcaccacgcaaggttcggctggagccgtggtaatgacaccggagaagcgctacgatattccggctgctaaaactcgtcgtgtcgttgatccaactggttgcggcgacgcgtttcgcgccggcctgatctatggtattcagcatgaatatgattggttgaccattggccgcatgggaaacttaatgggtgcgctgaaagtggaacaccctggcacccaaaatcagcgtttcgattttgccgaattcaacgaccagttcaaacaatattttggctacgcgctc

SEQ ID NO: 1722 - protein, 321 aa, synthetic construct
  REGION 1..321: note = variant of adenosine kinase from Xanthemonas campestris
MHHHHHHGGSGMSALICGSLAYDNIMVFPDYFKNHILPDRVHRLNVSFLVFDMRREFGGCAGNIAYNLHLLGGAPIVMATVGQDFGPYREHFETLGIDLSRVKIIDDLSTPQGFITTDMDQNQITAFHSGAMMRSYENHVRDVPGVTLGLVGPDGREGMIQNGEEFAAMGIPFIFDPGQAVPLFSGPELREFIEQADYVVVNDYESMLLQARTGWNEQDIVSRVQAYITTQGSAGAVVMTPEKRYDIPAAKTRRVVDPTGCGDAFRAGLIYGIQHEYDWLTIGRMGNLMGALKVEHPGTQNQRFDFAEFNDQFKQYFGYAL

SEQ ID NO: 1723 - DNA, 963 bp, synthetic construct
  misc_feature 1..963: note = variant of adenosine kinase from Xanthemonas campestris
  source 1..963: mol_type = other DNA
atgcatcatcaccatcaccatggggggtccggtatgagtgcactcatttgcggttctttagcgtatgataacatcatggtgtttccggacctgttcaagaaccatattctgcccgatcgtgttcaccgcctcaatgtcagctttctggtatttgacatgcgtcgtgaatttggaggctgtgccggcaacattgcgtacaatctgcatctgttgggtggtcgcccgatcgtaatggctacggtgggccaagatttcggtccgtatcgcgaacacttcgaaactctgggcattgacttatcccgcgtcaagatcatcgatgatctgagtacaccgcaggggttcattaccaccgacatggatcaaaaccagattacggcgtttcacagcggcgcaatgatgcgttcgtacgaaaatcacgttcgtgatgtgccgggtgttaccttgggcctcgtaggtcctgatggacgcgagggcatgatccaaaatggccaagaatttgctgctatgggcattccgttcatttttgacccaggtcaggcagtgcctctgttcagcggcccggaactgcgcgaatttatcgaacaggcggactatgtggtggtcaacgattacgaaagcatgcttcttcaagcccgtactggctggaacgagcaggacattgttagccgcgtgcaggcgtatatcaccacgcaaggttcggctggagccgtggtacatacaccggagaagacctacgttattccggctgctaaaactcgtcgtgtcgttgatccaactggttgcggcgacgcgtttcgcgccggcctgatctatggtattcagcatgaatatgattggttgaccattggccgcatgggaaacttaatgggtgcgctgaaagtggaacaccctggcacccaaaatcagcgtttcgattttgccgaattcaacgaccagttcaaacaatattttggctacgcgctc

SEQ ID NO: 1724 - protein, 321 aa, synthetic construct
  REGION 1..321: note = variant of adenosine kinase from Xanthemonas campestris
MHHHHHHGGSGMSALICGSLAYDNIMVFPDLFKNHILPDRVHRLNVSFLVFDMRREFGGCAGNIAYNLHLLGGRPIVMATVGQDFGPYREHFETLGIDLSRVKIIDDLSTPQGFITTDMDQNQITAFHSGAMMRSYENHVRDVPGVTLGLVGPDGREGMIQNGQEFAAMGIPFIFDPGQAVPLFSGPELREFIEQADYVVVNDYESMLLQARTGWNEQDIVSRVQAYITTQGSAGAVVHTPEKTYVIPAAKTRRVVDPTGCGDAFRAGLIYGIQHEYDWLTIGRMGNLMGALKVEHPGTQNQRFDFAEFNDQFKQYFGYAL

SEQ ID NO: 1725 - DNA, 963 bp, synthetic construct
  misc_feature 1..963: note = variant of adenosine kinase from Xanthemonas campestris
  source 1..963: mol_type = other DNA
atgcatcatcaccatcaccatggggggtccggtatgagtgcactcatttgcggttctttagcgtatgataacatcatggtgtttccggactatttcaagaaccatattctgcccgatcgtgttcaccgcctcaatgtcagctttctggtatttgacctgcgtcgtgaatttggaggctgtgccggcaacattgcgtacaatctgcatctgttgggtggtgctccgatcgtaatggctacggtgggccaagatttcggtccgtatcgcgaacacttcgaaactctgggcattgacttatcccgcgtcaagatcatcgatgatctgagtacaccgcaggggttcattaccaccgacatggatcaaaaccagattacggcgtttcacagcggcgcaatgatgcgttcgtacgaaaatcacgttcgtgatgtgccgggtgttaccttgggcctcgtaggtcctgatggacgcgagggcatgatccaaaatgccgaagaatttgctgctatgggcattccgttcatttttgacccaggtcaggcagtgcctctgttcagcggcccggaactgcgcgaatttatcgaacaggcggactatgtggtggtcaacgattacgaaagcatgcttcttcaagcccgtactggctggaacgagcaggacattgttagccgcgtgcaggcgtatatcaccacgcaaggttcggctggagccgtggtaatgacaccggagaagacctacgatattccggctgctaaaactcgtcgtgtcgttgatccaactggttgcggcgacgcgtttcgcgccggcctgatctatggtattcagcatgaatatgattggttgaccattggccgcatgggaaacttaatgggtgcgctgaaagtggaacaccctggcacccaaaatcagcgtttcgattttgccgaattcaacgaccagttcaaacaatattttggctacgcgctc

SEQ ID NO: 1726 - protein, 321 aa, synthetic construct
  REGION 1..321: note = variant of adenosine kinase from Xanthemonas campestris
MHHHHHHGGSGMSALICGSLAYDNIMVFPDYFKNHILPDRVHRLNVSFLVFDLRREFGGCAGNIAYNLHLLGGAPIVMATVGQDFGPYREHFETLGIDLSRVKIIDDLSTPQGFITTDMDQNQITAFHSGAMMRSYENHVRDVPGVTLGLVGPDGREGMIQNAEEFAAMGIPFIFDPGQAVPLFSGPELREFIEQADYVVVNDYESMLLQARTGWNEQDIVSRVQAYITTQGSAGAVVMTPEKTYDIPAAKTRRVVDPTGCGDAFRAGLIYGIQHEYDWLTIGRMGNLMGALKVEHPGTQNQRFDFAEFNDQFKQYFGYAL

SEQ ID NO: 1727 - DNA, 963 bp, synthetic construct
  misc_feature 1..963: note = variant of adenosine kinase from Xanthemonas campestris
  source 1..963: mol_type = other DNA
atgcatcatcaccatcaccatggggggtccggtatgagtgcactcatttgcggttctttagcgtatgataacatcatggtgtttccggactatttcaagaaccatattctgcccgatcgtgttcaccgcctcaatgtcagctttctggtatttgacatgcgtcgtgaatttggaggctgtgccggcaacattgcgtacaatctgcatctgttgggtggtgccccgatcgtaatggctacggtgggccaagatttcggtccgtatcgcgaacacttcgaaactctgggcattgacttatcccgcgtcaagatcatcgatgatctgagtacaccgcaggggttcattaccaccgacatggatcaaaaccagattacggcgtttcacagcggcgcaatgatgcgttcgtacgaaaatcacgttcgtgatgtgccgggtgttaccttgggcctcgtaggtcctgatggacgcgagggcatgatccaaaatgccgaagaatttgctgctatgggcattccgttcatttttgacccaggtcaggcagtgcctctgttcagcggcccggaactgcgcgaatttatcgaacaggcggactatgtggtggtcaacgattacgaaagcatgcttcttcaagcccgtactggctggaacgagcaggacattgttagccgcgtgcaggcgtatatcaccacgcaaggttcggctggagccgtggtacatacaccggagaagcgctacagcattccggctgctaaaactcgtcgtgtcgttgatccaactggttgcggcgacgcgtttcgcgccggcctgatctatggtattcagcatgaatatgattggttgaccattggccgcatgggaaacttaatgggtgcgctgaaagtggaacaccctggcacccaaaatcagcgtttcgattttgccgaattcaacgaccagttcaaacaatattttggctacgcgctc

SEQ ID NO: 1728 - protein, 321 aa, synthetic construct
  REGION 1..321: note = variant of adenosine kinase from Xanthemonas campestris
MHHHHHHGGSGMSALICGSLAYDNIMVFPDYFKNHILPDRVHRLNVSFLVFDMRREFGGCAGNIAYNLHLLGGAPIVMATVGQDFGPYREHFETLGIDLSRVKIIDDLSTPQGFITTDMDQNQITAFHSGAMMRSYENHVRDVPGVTLGLVGPDGREGMIQNAEEFAAMGIPFIFDPGQAVPLFSGPELREFIEQADYVVVNDYESMLLQARTGWNEQDIVSRVQAYITTQGSAGAVVHTPEKRYSIPAAKTRRVVDPTGCGDAFRAGLIYGIQHEYDWLTIGRMGNLMGALKVEHPGTQNQRFDFAEFNDQFKQYFGYAL

SEQ ID NO: 1729 - DNA, 963 bp, synthetic construct
  misc_feature 1..963: note = variant of adenosine kinase from Xanthemonas campestris
  source 1..963: mol_type = other DNA
atgcatcatcaccatcaccatggggggtccggtatgagtgcactcatttgcggttctttagcgtatgataacatcatggtgtttccggaccagttcaagaaccatattctgcccgatcgtgttcaccgcctcaatgtcagctttctggtatttgacatgcgtcgtgaatttggaggctgtgccggcaacattgcgtacaatctgcatctgttgggtggtgctccgatcgtaatggctacggtgggccaagatttcggtccgtatcgcgaacacttcgaaactctgggcattgacttatcccgcgtcaagatcatcgatgatctgagtacaccgcaggggttcattaccaccgacatggatcaaaaccagattacggcgtttcacagcggcgcaatgatgcgttcgtacgaaaatcacgttcgtgatgtgccgggtgttaccttgggcctcgtaggtcctgatggacgcgagggcatgatccaaaatgccgaagaatttgctgctatgggcattccgttcatttttgacccaggtcaggcagtgcctctgttcagcggcccggaactgcgcgaatttatcgaacaggcggactatgtggtggtcaacgattacgaaagcatgcttcttcaagcccgtactggctggaacgagcaggacattgttagccgcgtgcaggcgtatatcaccacgcaaggttcggctggagccgtggtacatacaccggagaagacctacgatattccggctgctaaaactcgtcgtgtcgttgatccaactggttgcggcgacgcgtttcgcgccggcctgatctatggtattcagcatgaatatgattggttgaccattggccgcatgggaaacttaatgggtgcgctgaaagtggaacaccctggcacccaaaatcagcgtttcgattttgccgaattcaacgaccagttcaaacaatattttggctacgcgctc

SEQ ID NO: 1730 - protein, 321 aa, synthetic construct
  REGION 1..321: note = variant of adenosine kinase from Xanthemonas campestris
MHHHHHHGGSGMSALICGSLAYDNIMVFPDQFKNHILPDRVHRLNVSFLVFDMRREFGGCAGNIAYNLHLLGGAPIVMATVGQDFGPYREHFETLGIDLSRVKIIDDLSTPQGFITTDMDQNQITAFHSGAMMRSYENHVRDVPGVTLGLVGPDGREGMIQNAEEFAAMGIPFIFDPGQAVPLFSGPELREFIEQADYVVVNDYESMLLQARTGWNEQDIVSRVQAYITTQGSAGAVVHTPEKTYDIPAAKTRRVVDPTGCGDAFRAGLIYGIQHEYDWLTIGRMGNLMGALKVEHPGTQNQRFDFAEFNDQFKQYFGYAL

SEQ ID NO: 1731 - DNA, 963 bp, synthetic construct
  misc_feature 1..963: note = variant of adenosine kinase from Xanthemonas campestris
  source 1..963: mol_type = other DNA
atgcatcatcaccatcaccatggggggtccggtatgagtgcactcatttgcggttctttagcgtatgataacatcatggtgtttccggaccagttcaagaaccatattctgcccgatcgtgttcaccgcctcaatgtcagctttctggtatttgacctgcgtcgtgaatttggaggctgtgccggcaacattgcgtacaatctgcatctgttgggtggtgctccgatcgtaatggctacggtgggccaagatttcggtccgtatcgcgaacacttcgaaactctgggcattgacttatcccgcgtcaagatcatcgatgatctgagtacaccgcaggggttcattaccaccgacatggatcaaaaccagattacggcgtttcacagcggcgcaatgatgcgttcgtacgaaaatcacgttcgtgatgtgccgggtgttaccttgggcctcgtaggtcctgatggacgcgagggcatgatccaaaatggcgaagaatttgctgctatgggcattccgttcatttttgacccaggtcaggcagtgcctctgttcagcggcccggaactgcgcgaatttatcgaacaggcggactatgtggtggtcaacgattacgaaagcatgcttcttcaagcccgtactggctggaacgagcaggacattgttagccgcgtgcaggcgtatatcaccacgcaaggttcggctggagccgtggtacatacaccggagaagacctacagcattccggctgctaaaactcgtcgtgtcgttgatccaactggttgcggcgacgcgtttcgcgccggcctgatctatggtattcagcatgaatatgattggttgaccattggccgcatgggaaacttaatgggtgcgctgaaagtggaacaccctggcacccaaaatcagcgtttcgattttgccgaattcaacgaccagttcaaacaatattttggctacgcgctc

SEQ ID NO: 1732 - protein, 321 aa, synthetic construct
  REGION 1..321: note = variant of adenosine kinase from Xanthemonas campestris
MHHHHHHGGSGMSALICGSLAYDNIMVFPDQFKNHILPDRVHRLNVSFLVFDLRREFGGCAGNIAYNLHLLGGAPIVMATVGQDFGPYREHFETLGIDLSRVKIIDDLSTPQGFITTDMDQNQITAFHSGAMMRSYENHVRDVPGVTLGLVGPDGREGMIQNGEEFAAMGIPFIFDPGQAVPLFSGPELREFIEQADYVVVNDYESMLLQARTGWNEQDIVSRVQAYITTQGSAGAVVHTPEKTYSIPAAKTRRVVDPTGCGDAFRAGLIYGIQHEYDWLTIGRMGNLMGALKVEHPGTQNQRFDFAEFNDQFKQYFGYAL

SEQ ID NO: 1733 - DNA, 963 bp, synthetic construct
  misc_feature 1..963: note = variant of adenosine kinase from Xanthemonas campestris
  source 1..963: mol_type = other DNA
atgcatcatcaccatcaccatggggggtccggtatgagtgcactcatttgcggttctttagcgtatgataacatcatggtgtttccggaccggttcaagaaccatattctgcccgatcgtgttcaccgcctcaatgtcagctttctggtatttgacctgcgtcgtgaatttggaggctgtgccggcaacattgcgtacaatctgcatctgttgggtggtaccccgatcgtaatggctacggtgggccaagatttcggtccgtatcgcgaacacttcgaaactctgggcattgacttatcccgcgtcaagatcatcgatgatctgagtacaccgcaggggttcattaccaccgacatggatcaaaaccagattacggcgtttcacagcggcgcaatgatgcgttcgtacgaaaatcacgttcgtgatgtgccgggtgttaccttgggcctcgtaggtcctgatggacgcgagggcatgatccaaaatggcgaagaatttgctgctatgggcattccgttcatttttgacccaggtcaggcagtgcctctgttcagcggcccggaactgcgcgaatttatcgaacaggcggactatgtggtggtcaacgattacgaaagcatgcttcttcaagcccgtactggctggaacgagcaggacattgttagccgcgtgcaggcgtatatcaccacgcaaggttcggctggagccgtggtacatacaccggagaagacctacagcattccggctgctaaaactcgtcgtgtcgttgatccaactggttgcggcgacgcgtttcgcgccggcctgatctatggtattcagcatgaatatgattggttgaccattggccgcatgggaaacttaatgggtgcgctgaaagtggaacaccctggcacccaaaatcagcgtttcgattttgccgaattcaacgaccagttcaaacaatattttggctacgcgctc

SEQ ID NO: 1734 - protein, 321 aa, synthetic construct
  REGION 1..321: note = variant of adenosine kinase from Xanthemonas campestris
MHHHHHHGGSGMSALICGSLAYDNIMVFPDRFKNHILPDRVHRLNVSFLVFDLRREFGGCAGNIAYNLHLLGGTPIVMATVGQDFGPYREHFETLGIDLSRVKIIDDLSTPQGFITTDMDQNQITAFHSGAMMRSYENHVRDVPGVTLGLVGPDGREGMIQNGEEFAAMGIPFIFDPGQAVPLFSGPELREFIEQADYVVVNDYESMLLQARTGWNEQDIVSRVQAYITTQGSAGAVVHTPEKTYSIPAAKTRRVVDPTGCGDAFRAGLIYGIQHEYDWLTIGRMGNLMGALKVEHPGTQNQRFDFAEFNDQFKQYFGYAL

SEQ ID NO: 1735 - DNA, 963 bp, synthetic construct
  misc_feature 1..963: note = variant of adenosine kinase from Xanthemonas campestris
  source 1..963: mol_type = other DNA
atgcatcatcaccatcaccatggggggtccggtatgagtgcactcatttgcggttctttagcgtatgataacatcatggtgtttccggactatttcaagaaccatattctgcccgatcgtgttcaccgcctcaatgtcagctttctggtatttgacatgcgtcgtgaatttggaggctgtgccggcaacattgcgtacaatctgcatctgttgggtggtgctccgatcgtaatggctacggtgggccaagatttcggtccgtatcgcgaacacttcgaaactctgggcattgacttatcccgcgtcaagatcatcgatgatctgagtacaccgcaggggttcattaccaccgacatggatcaaaaccagattacggcgtttcacagcggcgcaatgatgcgttcgtacgaaaatcacgttcgtgatgtgccgggtgttaccttgggcctcgtaggtcctgatggacgcgagggcatgatccaaaatggcgaagaatttgctgctatgggcattccgttcatttttgacccaggtcaggcagtgcctctgttcagcggcccggaactgcgcgaatttatcgaacaggcggactatgtggtggtcaacgattacgaaagccgccttcttcaagcccgtactggctggaacgagcaggacattgttagccgcgtgcaggcgtatatcaccacgcaaggttcggctggagccgtggtaatgacaccggagaagacctacgttattccggctgctaaaactcgtcgtgtcgttgatccaactggttgcggcgacgcgtttcgcgccggcctgatctatggtattcagcatgaatatgattggttgaccattggccgcatgggaaacttaatgggtgcgctgaaagtggaacaccctggcacccaaaatcagcgtttcgattttgccaaattcaacgaccagttcaaacaatattttggctacgcgctc

SEQ ID NO: 1736 - protein, 321 aa, synthetic construct
  REGION 1..321: note = variant of adenosine kinase from Xanthemonas campestris
MHHHHHHGGSGMSALICGSLAYDNIMVFPDYFKNHILPDRVHRLNVSFLVFDMRREFGGCAGNIAYNLHLLGGAPIVMATVGQDFGPYREHFETLGIDLSRVKIIDDLSTPQGFITTDMDQNQITAFHSGAMMRSYENHVRDVPGVTLGLVGPDGREGMIQNGEEFAAMGIPFIFDPGQAVPLFSGPELREFIEQADYVVVNDYESRLLQARTGWNEQDIVSRVQAYITTQGSAGAVVMTPEKTYVIPAAKTRRVVDPTGCGDAFRAGLIYGIQHEYDWLTIGRMGNLMGALKVEHPGTQNQRFDFAKFNDQFKQYFGYAL

SEQ ID NO: 1737 - DNA, 963 bp, synthetic construct
  misc_feature 1..963: note = variant of adenosine kinase from Xanthemonas campestris
  source 1..963: mol_type = other DNA
atgcatcatcaccatcaccatggggggtccggtatgagtgcactcatttgcggttctttagcgtatgataacatcatggtgtttccggaccggttcaagaaccatattctgcccgatcgtgttcaccgcctcaatgtcagctttctggtatttgacatgcgtcgtgaatttggaggctgtgccggcaacattgcgtacaatctgcatctgttgggtggtgctccgatcgtaatggctacggtgggccaagatttcggtccgtatcgcgaacacttcgaaactctgggcattgacttatcccgcgtcaagatcatcgatgatctgagtacaccgcaggggttcattaccaccgacatggatcaaaaccagattacggcgtttcacagcggcgcaatgatgcgttcgtacgaaaatcacgttcgtgatgtgccgggtgttaccttgggcctcgtaggtcctgatggacgcgagggcatgatccaaaatgccgaagaatttgctgctatgggcattccgttcatttttgacccaggtcaggcagtgcctctgttcagcggcccggaactgcgcgaatttatcgaacaggcggactatgtggtggtcaacgattacgaaagcatgcttcttcaagcccgtactggctggaacgagcaggacattgttagccgcgtgcaggcgtatatcaccacgcaaggttcggctggagccgtggtacatacaccggagaagcgctacagcattccggctgctaaaactcgtcgtgtcgttgatccaactggttgcggcgacgcgtttcgcgccggcctgatctatggtattcagcatgaatatgattggttgaccattggccgcatgggaaacttaatgggtgcgctgaaagtggaacaccctggcacccaaaatcagcgtttcgattttgccgaattcaacgaccagttcaaacaatattttggctacgcgctc

SEQ ID NO: 1738 - protein, 321 aa, synthetic construct
  REGION 1..321: note = variant of adenosine kinase from Xanthemonas campestris
MHHHHHHGGSGMSALICGSLAYDNIMVFPDRFKNHILPDRVHRLNVSFLVFDMRREFGGCAGNIAYNLHLLGGAPIVMATVGQDFGPYREHFETLGIDLSRVKIIDDLSTPQGFITTDMDQNQITAFHSGAMMRSYENHVRDVPGVTLGLVGPDGREGMIQNAEEFAAMGIPFIFDPGQAVPLFSGPELREFIEQADYVVVNDYESMLLQARTGWNEQDIVSRVQAYITTQGSAGAVVHTPEKRYSIPAAKTRRVVDPTGCGDAFRAGLIYGIQHEYDWLTIGRMGNLMGALKVEHPGTQNQRFDFAEFNDQFKQYFGYAL

SEQ ID NO: 1739 - DNA, 963 bp, synthetic construct
  misc_feature 1..963: note = variant of adenosine kinase from Xanthemonas campestris
  source 1..963: mol_type = other DNA
atgcatcatcaccatcaccatggggggtccggtatgagtgcactcatttgcggttctttagcgtatgataacatcatggtgtttccggactatttcaagaaccatattctgcccgatcgtgttcaccgcctcaatgtcagctttctggtatttgacatgcgtcgtgaatttggaggctgtgccggcaacattgcgtacaatctgcatctgttgggtggtcgcccgatcgtaatggctacggtgggccaagatttcggtccgtatcgcgaacacttcgaaactctgggcattgacttatcccgcgtcaagatcatcgatgatctgagtacaccgcaggggttcattaccaccgacatggatcaaaaccagattacggcgtttcacagcggcgcaatgatgcgttcgtacgaaaatcacgttcgtgatgtgccgggtgttaccttgggcctcgtaggtcctgatggacgcgagggcatgatccaaaatgccgaagaatttgctgctatgggcattccgttcatttttgacccaggtcaggcagtgcctctgttcagcggcccggaactgcgcgaatttatcgaacaggcggactatgtggtggtcaacgattacgaaagcatgcttcttcaagcccgtactggctggaacgagcaggacattgttagccgcgtgcaggcgtatatcaccacgcaaggttcggctggagccgtggtaatgacaccggagaagacctacgatattccggctgctaaaactcgtcgtgtcgttgatccaactggttgcggcgacgcgtttcgcgccggcctgatctatggtattcagcatgaatatgattggttgaccattggccgcatgggaaacttaatgggtgcgctgaaagtggaacaccctggcacccaaaatcagcgtttcgattttgccaaattcaacgaccagttcaaacaatattttggctacgcgctc

SEQ ID NO: 1740 - protein, 321 aa, synthetic construct
  REGION 1..321: note = variant of adenosine kinase from Xanthemonas campestris
MHHHHHHGGSGMSALICGSLAYDNIMVFPDYFKNHILPDRVHRLNVSFLVFDMRREFGGCAGNIAYNLHLLGGRPIVMATVGQDFGPYREHFETLGIDLSRVKIIDDLSTPQGFITTDMDQNQITAFHSGAMMRSYENHVRDVPGVTLGLVGPDGREGMIQNAEEFAAMGIPFIFDPGQAVPLFSGPELREFIEQADYVVVNDYESMLLQARTGWNEQDIVSRVQAYITTQGSAGAVVMTPEKTYDIPAAKTRRVVDPTGCGDAFRAGLIYGIQHEYDWLTIGRMGNLMGALKVEHPGTQNQRFDFAKFNDQFKQYFGYAL

SEQ ID NO: 1741 - DNA, 963 bp, synthetic construct
  misc_feature 1..963: note = variant of adenosine kinase from Xanthemonas campestris
  source 1..963: mol_type = other DNA
atgcatcatcaccatcaccatggggggtccggtatgagtgcactcatttgcggttctttagcgtatgataacatcatggtgtttccggaccagttcaagaaccatattctgcccgatcgtgttcaccgcctcaatgtcagctttctggtatttgacatgcgtcgtgaatttggaggctgtgccggcaacattgcgtacaatctgcatctgttgggtggtgccccgatcgtaatggctacggtgggccaagatttcggtccgtatcgcgaacacttcgaaactctgggcattgacttatcccgcgtcaagatcatcgatgatctgagtacaccgcaggggttcattaccaccgacatggatcaaaaccagattacggcgtttcacagcggcgcaatgatgcgttcgtacgaaaatcacgttcgtgatgtgccgggtgttaccttgggcctcgtaggtcctgatggacgcgagggcatgatccaaaatggcgaagaatttgctgctatgggcattccgttcatttttgacccaggtcaggcagtgcctctgttcagcggcccggaactgcgcgaatttatcgaacaggcggactatgtggtggtcaacgattacgaaagcatgcttcttcaagcccgtactggctggaacgagcaggacattgttagccgcgtgcaggcgtatatcaccacgcaaggttcggctggagccgtggtacatacaccggagaagacctacgttattccggctgctaaaactcgtcgtgtcgttgatccaactggttgcggcgacgcgtttcgcgccggcctgatctatggtattcagcatgaatatgattggttgaccattggccgcatgggaaacttaatgggtgcgctgaaagtggaacaccctggcacccaaaatcagcgtttcgattttgccgaattcaacgaccagttcaaacaatattttggctacgcgctc

SEQ ID NO: 1742 - protein, 321 aa, synthetic construct
  REGION 1..321: note = variant of adenosine kinase from Xanthemonas campestris
MHHHHHHGGSGMSALICGSLAYDNIMVFPDQFKNHILPDRVHRLNVSFLVFDMRREFGGCAGNIAYNLHLLGGAPIVMATVGQDFGPYREHFETLGIDLSRVKIIDDLSTPQGFITTDMDQNQITAFHSGAMMRSYENHVRDVPGVTLGLVGPDGREGMIQNGEEFAAMGIPFIFDPGQAVPLFSGPELREFIEQADYVVVNDYESMLLQARTGWNEQDIVSRVQAYITTQGSAGAVVHTPEKTYVIPAAKTRRVVDPTGCGDAFRAGLIYGIQHEYDWLTIGRMGNLMGALKVEHPGTQNQRFDFAEFNDQFKQYFGYAL

SEQ ID NO: 1743 - DNA, 963 bp, synthetic construct
  misc_feature 1..963: note = variant of adenosine kinase from Xanthemonas campestris
  source 1..963: mol_type = other DNA
atgcatcatcaccatcaccatggggggtccggtatgagtgcactcatttgcggttctttagcgtatgataacatcatggtgtttccggactatttcaagaaccatattctgcccgatcgtgttcaccgcctcaatgtcagctttctggtatttgacatgcgtcgtgaatttggaggctgtgccggcaacattgcgtacaatctgcatctgttgggtggtcgcccgatcgtaatggctacggtgggccaagatttcggtccgtatcgcgaacacttcgaaactctgggcattgacttatcccgcgtcaagatcatcgatgatctgagtacaccgcaggggttcattaccaccgacatggatcaaaaccagattacggcgtttcacagcggcgcaatgatgcgttcgtacgaaaatcacgttcgtgatgtgccgggtgttaccttgggcctcgtaggtcctgatggacgcgagggcatgatccaaaatgccgaagaatttgctgctatgggcattccgttcatttttgacccaggtcaggcagtgcctctgttcagcggcccggaactgcgcgaatttatcgaacaggcggactatgtggtggtcaacgattacgaaagccgccttcttcaagcccgtactggctggaacgagcaggacattgttagccgcgtgcaggcgtatatcaccacgcaaggttcggctggagccgtggtaatgacaccggagaagcgctacgttattccggctgctaaaactcgtcgtgtcgttgatccaactggttgcggcgacgcgtttcgcgccggcctgatctatggtattcagcatgaatatgattggttgaccattggccgcatgggaaacttaatgggtgcgctgaaagtggaacaccctggcacccaaaatcagcgtttcgattttgccgaattcaacgaccggttcaaacaatattttggctacgcgctc

SEQ ID NO: 1744 - protein, 321 aa, synthetic construct
  REGION 1..321: note = variant of adenosine kinase from Xanthemonas campestris
MHHHHHHGGSGMSALICGSLAYDNIMVFPDYFKNHILPDRVHRLNVSFLVFDMRREFGGCAGNIAYNLHLLGGRPIVMATVGQDFGPYREHFETLGIDLSRVKIIDDLSTPQGFITTDMDQNQITAFHSGAMMRSYENHVRDVPGVTLGLVGPDGREGMIQNAEEFAAMGIPFIFDPGQAVPLFSGPELREFIEQADYVVVNDYESRLLQARTGWNEQDIVSRVQAYITTQGSAGAVVMTPEKRYVIPAAKTRRVVDPTGCGDAFRAGLIYGIQHEYDWLTIGRMGNLMGALKVEHPGTQNQRFDFAEFNDRFKQYFGYAL

SEQ ID NO: 1745 - DNA, 963 bp, synthetic construct
  misc_feature 1..963: note = variant of adenosine kinase from Xanthemonas campestris
  source 1..963: mol_type = other DNA
atgcatcatcaccatcaccatggggggtccggtatgagtgcactcatttgcggttctttagcgtatgataacatcatggtgtttccggactatttcaagaaccatattctgcccgatcgtgttcaccgcctcaatgtcagctttctggtatttgacatgcgtcgtgaatttggaggctgtgccggcaacattgcgtacaatctgcatctgttgggtggtcgcccgatcgtaatggctacggtgggccaagatttcggtccgtatcgcgaacacttcgaaactctgggcattgacttatcccgcgtcaagatcatcgatgatctgagtacaccgcaggggttcattaccaccgacatggatcaaaaccagattacggcgtttcacagcggcgcaatgatgcgttcgtacgaaaatcacgttcgtgatgtgccgggtgttaccttgggcctcgtaggtcctgatggacgcgagggcatgatccaaaatgccgaagaatttgctgctatgggcattccgttcatttttgacccaggtcaggcagtgcctctgttcagcggcccggaactgcgcgaatttatcgaacaggcggactatgtggtggtcaacgattacgaaagccgccttcttcaagcccgtactggctggaacgagcaggacattgttagccgcgtgcaggcgtatatcaccacgcaaggttcggctggagccgtggtaatgacaccggagaagcgctacgttattccggctgctaaaactcgtcgtgtcgttgatccaactggttgcggcgacgcgtttcgcgccggcctgatctatggtattcagcatgaatatgattggttgaccattggccgcatgggaaacttaatgggtgcgctgaaagtggaacaccctggcacccaaaatcagcgtttcacgtttgccgaattcaacgaccagttcaaacaatattttggctacgcgctc

SEQ ID NO: 1746 - protein, 321 aa, synthetic construct
  REGION 1..321: note = variant of adenosine kinase from Xanthemonas campestris
MHHHHHHGGSGMSALICGSLAYDNIMVFPDYFKNHILPDRVHRLNVSFLVFDMRREFGGCAGNIAYNLHLLGGRPIVMATVGQDFGPYREHFETLGIDLSRVKIIDDLSTPQGFITTDMDQNQITAFHSGAMMRSYENHVRDVPGVTLGLVGPDGREGMIQNAEEFAAMGIPFIFDPGQAVPLFSGPELREFIEQADYVVVNDYESRLLQARTGWNEQDIVSRVQAYITTQGSAGAVVMTPEKRYVIPAAKTRRVVDPTGCGDAFRAGLIYGIQHEYDWLTIGRMGNLMGALKVEHPGTQNQRFTFAEFNDQFKQYFGYAL

SEQ ID NO: 1747 - DNA, 963 bp, synthetic construct
  misc_feature 1..963: note = variant of adenosine kinase from Xanthemonas campestris
  source 1..963: mol_type = other DNA
atgcatcatcaccatcaccatggggggtccggtatgagtgcactcatttgcggttctttagcgtatgataacatcatggtgtttccggactatttcaagaaccatattctgcccgatcgtgttcaccgcctcaatgtcagctttctggtatttgacatgcgtcgtgaatttggaggctgtgccggcaacattgcgtacaatctgcatctgttgggtggtcgcccgatcgtaatggctacggtgggccaagatttcggtccgtatcgcgaacacttcgaaactctgggcattgacttatcccgcgtcaagatcatcgatgatctgagtacaccgcaggggttcattaccaccgacatggatcaaaaccagattacggcgtttcacagcggcgcaatgatgcgttcgtacgaaaatcacgttcgtgatgtgccgggtgttaccttgggcctcgtaggtcctgatggacgcgagggcatgatccaaaatgccgaagaatttgctgctatgggcattccgttcatttttgacccaggtcaggcagtgcctctgttcagcggcccggaactgcgcgaatttatcgaacaggcggactatgtggtggtcaacgattacgaaagccgccttcttcaagcccgtactggctggaacgagcaggacattgttagccgcgtgcaggcgtatatcaccacgcaaggttcggctggagccgtggtaatgacaccggagaagcgctacgatattccggctgctaaaactcgtcgtgtcgttgatccaactggttgcggcgacgcgtttcgcgccggcctgatctatggtattcagcatgaatatgattggttgaccattggccgcatgggaaacttaatgggtgcgctgaaagtggaacaccctggcacccaaaatcagcgtttcgattttgccgaattcaacgaccagttcaaacaatattttggctacgcgctc

SEQ ID NO: 1748 - protein, 321 aa, synthetic construct
  REGION 1..321: note = variant of adenosine kinase from Xanthemonas campestris
MHHHHHHGGSGMSALICGSLAYDNIMVFPDYFKNHILPDRVHRLNVSFLVFDMRREFGGCAGNIAYNLHLLGGRPIVMATVGQDFGPYREHFETLGIDLSRVKIIDDLSTPQGFITTDMDQNQITAFHSGAMMRSYENHVRDVPGVTLGLVGPDGREGMIQNAEEFAAMGIPFIFDPGQAVPLFSGPELREFIEQADYVVVNDYESRLLQARTGWNEQDIVSRVQAYITTQGSAGAVVMTPEKRYDIPAAKTRRVVDPTGCGDAFRAGLIYGIQHEYDWLTIGRMGNLMGALKVEHPGTQNQRFDFAEFNDQFKQYFGYAL

SEQ ID NO: 1749 - DNA, 963 bp, synthetic construct
  misc_feature 1..963: note = variant of adenosine kinase from Xanthemonas campestris
  source 1..963: mol_type = other DNA
atgcatcatcaccatcaccatggggggtccggtatgagtgcactcatttgcggttctttagcgtatgataacatcatggtgtttccggactatttcaagaaccatattctgcccgatcgtgttcaccgcctcaatgtcagctttctggtatttgacatgcgtcgtgaatttggaggctgtgccggcaacattgcgtacaatctgcatctgttgggtggtcgcccgatcgtaatggctacggtgggccaagatttcggtccgtataaggaacacttcgaaactctgggcattgacttatcccgcgtcaagatcatcgatgatctgagtacaccgcaggggttcattaccaccgacatggatcaaaaccagattacggcgtttcacagcggcgcaatgatgcgttcgtacgaaaatcacgttcgtgatgtgccgggtgttaccttgggcctcgtaggtcctgatggacgcgagggcatgatccaaaatgccgaagaatttgctgctatgggcattccgttcatttttgacccaggtcaggcagtgcctctgttcagcggcccggaactgcgcgaatttatcgaacaggcggactatgtggtggtcaacgattacgaaagccgccttcttcaagcccgtactggctggaacgagcaggacattgttagccgcgtgcaggcgtatatcaccacgcaaggttcggctggagccgtggtaatgacaccggagaagcgctacgttattccggctgctaaaactcgtcgtgtcgttgatccaactggttgcggcgacgcgtttcgcgccggcctgatctatggtattcagcatgaatatgattggttgaccattggccgcatgggaaacttaatgggtgcgctgaaagtggaacaccctggcacccaaaatcagcgtttcgattttgccgaattcaacgaccagttcaaacaatattttggctacgcgctc

SEQ ID NO: 1750 - protein, 321 aa, synthetic construct
  REGION 1..321: note = variant of adenosine kinase from Xanthemonas campestris
MHHHHHHGGSGMSALICGSLAYDNIMVFPDYFKNHILPDRVHRLNVSFLVFDMRREFGGCAGNIAYNLHLLGGRPIVMATVGQDFGPYKEHFETLGIDLSRVKIIDDLSTPQGFITTDMDQNQITAFHSGAMMRSYENHVRDVPGVTLGLVGPDGREGMIQNAEEFAAMGIPFIFDPGQAVPLFSGPELREFIEQADYVVVNDYESRLLQARTGWNEQDIVSRVQAYITTQGSAGAVVMTPEKRYVIPAAKTRRVVDPTGCGDAFRAGLIYGIQHEYDWLTIGRMGNLMGALKVEHPGTQNQRFDFAEFNDQFKQYFGYAL

SEQ ID NO: 1751 - DNA, 963 bp, synthetic construct
  misc_feature 1..963: note = variant of adenosine kinase from Xanthemonas campestris
  source 1..963: mol_type = other DNA
atgcatcatcaccatcaccatggggggtccggtatgagtgcactcatttgcggttctttagcgtatgataacatcatggtgtttccggactatttcgctaaccatattctgcccgatcgtgttcaccgcctcaatgtcagctttctggtatttgacatgcgtcgtgaatttggaggctgtgccggcaacattgcgtacaatctgcatctgttgggtggtcgcccgatcgtaatggctacggtgggccaagatttcggtccgtatcgcgaacacttcgaaactctgggcattgacttatcccgcgtcaagatcatcgatgatctgagtacaccgcaggggttcattaccaccgacatggatcaaaaccagattacggcgtttcacagcggcgcaatgatgcgttcgtacgaaaatcacgttcgtgatgtgccgggtgttaccttgggcctcgtaggtcctgatggacgcgagggcatgatccaaaatgccgaagaatttgctgctatgggcattccgttcatttttgacccaggtcaggcagtgcctctgttcagcggcccggaactgcgcgaatttatcgaacaggcggactatgtggtggtcaacgattacgaaagccgccttcttcaagcccgtactggctggaacgagcaggacattgttagccgcgtgcaggcgtatatcaccacgcaaggttcggctggagccgtggtaatgacaccggagaagcgctacgttattccggctgctaaaactcgtcgtgtcgttgatccaactggttgcggcgacgcgtttcgcgccggcctgatctatggtattcagcatgaatatgattggttgaccattggccgcatgggaaacttaatgggtgcgctgaaagtggaacaccctggcacccaaaatcagcgtttcgattttgccgaattcaacgaccagttcaaacaatattttggctacgcgctc

SEQ ID NO: 1752 - protein, 321 aa, synthetic construct
  REGION 1..321: note = variant of adenosine kinase from Xanthemonas campestris
MHHHHHHGGSGMSALICGSLAYDNIMVFPDYFANHILPDRVHRLNVSFLVFDMRREFGGCAGNIAYNLHLLGGRPIVMATVGQDFGPYREHFETLGIDLSRVKIIDDLSTPQGFITTDMDQNQITAFHSGAMMRSYENHVRDVPGVTLGLVGPDGREGMIQNAEEFAAMGIPFIFDPGQAVPLFSGPELREFIEQADYVVVNDYESRLLQARTGWNEQDIVSRVQAYITTQGSAGAVVMTPEKRYVIPAAKTRRVVDPTGCGDAFRAGLIYGIQHEYDWLTIGRMGNLMGALKVEHPGTQNQRFDFAEFNDQFKQYFGYAL

SEQ ID NO: 1753 - DNA, 963 bp, synthetic construct
  misc_feature 1..963: note = variant of adenosine kinase from Xanthemonas campestris
  source 1..963: mol_type = other DNA
atgcatcatcaccatcaccatggggggtccggtatgagtgcactcatttgcggttctttagcgtatgataacatcatggtgtttccggactatttcaagaaccatattctgcccgatcgtgttcaccgcctcaatgtcagctttctggtatttgacatgcgtcgtgaatttggaggctgtgccggcaacattgcgtacaatctgcatctgttgggtggtcgcccgatcgtaatggctacggtgggccaagatttcggtccgtatcgcgaacacttcgaaactctgggcattgacttatcccgcgtcaagatcatcgatgatctgagtacaccgcaggggttcattaccaccgacatggatcaaaaccagattacggcgtttcacagcggcgcaatgatgcgttcgtacgaaaatcacgttcgtgatgtgccgggtgttaccttgggcctcgtaggtcctgatggacgcgagggcatgatccaaaatgccgaagaatttgctgctatgggcattccgttcatttttgacccaggtcaggcagtgcctctgttcagcggcccggaactgcgcgaatttatcgaacaggcggactatgtggtggtcaacgattacgaaagccgccttcttcaagcccgtactggctggaacgaggatgacattgttagccgcgtgcaggcgtatatcaccacgcaaggttcggctggagccgtggtaatgacaccggagaagcgctacgttattccggctgctaaaactcgtcgtgtcgttgatccaactggttgcggcgacgcgtttcgcgccggcctgatctatggtattcagcatgaatatgattggttgaccattggccgcatgggaaacttaatgggtgcgctgaaagtggaacaccctggcacccaaaatcagcgtttcgattttgccgaattcaacgaccagttcaaacaatattttggctacgcgctc

SEQ ID NO: 1754 - protein, 321 aa, synthetic construct
  REGION 1..321: note = variant of adenosine kinase from Xanthemonas campestris
MHHHHHHGGSGMSALICGSLAYDNIMVFPDYFKNHILPDRVHRLNVSFLVFDMRREFGGCAGNIAYNLHLLGGRPIVMATVGQDFGPYREHFETLGIDLSRVKIIDDLSTPQGFITTDMDQNQITAFHSGAMMRSYENHVRDVPGVTLGLVGPDGREGMIQNAEEFAAMGIPFIFDPGQAVPLFSGPELREFIEQADYVVVNDYESRLLQARTGWNEDDIVSRVQAYITTQGSAGAVVMTPEKRYVIPAAKTRRVVDPTGCGDAFRAGLIYGIQHEYDWLTIGRMGNLMGALKVEHPGTQNQRFDFAEFNDQFKQYFGYAL

SEQ ID NO: 1755 - DNA, 963 bp, synthetic construct
  misc_feature 1..963: note = variant of adenosine kinase from Xanthemonas campestris
  source 1..963: mol_type = other DNA
atgcatcatcaccatcaccatggggggtccggtatgagtgcactcatttgcggttctttagcgtatgataacatcatggtgtttccggactatttcaagaaccatattctgcccgatcgtgttcaccgcctcaatgtcagctttctggtatttgacatgcgtcgtgaatttggaggctgtgccggcaacattgcgtacaatctgcatctgttgggtggtcgcccgatcgtaatggctacggtgggccaagatttcggtccgtatcgcgaacacttcgaaactctgggcattgacttatcccgcgtcaagatcatcgatgatctgagtacaccgcaggggttcattaccaccgacatggatcaaaaccagattacggcgtttcacagcggcgcaatgatgcgttcgtacgaaaatcacgttcgtgatgtgccgggtgttaatttgggcctcgtaggtcctgatggacgcgagggcatgatccaaaatgccgaagaatttgctgctatgggcattccgttcatttttgacccaggtcaggcagtgcctctgttcagcggcccggaactgcgcgaatttatcgaacaggcggactatgtggtggtcaacgattacgaaagccgccttcttcaagcccgtactggctggaacgagcaggacattgttagccgcgtgcaggcgtatatcaccacgcaaggttcggctggagccgtggtaatgacaccggagaagcgctacgttattccggctgctaaaactcgtcgtgtcgttgatccaactggttgcggcgacgcgtttcgcgccggcctgatctatggtattcagcatgaatatgattggttgaccattggccgcatgggaaacttaatgggtgcgctgaaagtggaacaccctggcacccaaaatcagcgtttcgattttgccgaattcaacgaccagttcaaacaatattttggctacgcgctc

SEQ ID NO: 1756 - protein, 321 aa, synthetic construct
  REGION 1..321: note = variant of adenosine kinase from Xanthemonas campestris
MHHHHHHGGSGMSALICGSLAYDNIMVFPDYFKNHILPDRVHRLNVSFLVFDMRREFGGCAGNIAYNLHLLGGRPIVMATVGQDFGPYREHFETLGIDLSRVKIIDDLSTPQGFITTDMDQNQITAFHSGAMMRSYENHVRDVPGVNLGLVGPDGREGMIQNAEEFAAMGIPFIFDPGQAVPLFSGPELREFIEQADYVVVNDYESRLLQARTGWNEQDIVSRVQAYITTQGSAGAVVMTPEKRYVIPAAKTRRVVDPTGCGDAFRAGLIYGIQHEYDWLTIGRMGNLMGALKVEHPGTQNQRFDFAEFNDQFKQYFGYAL

SEQ ID NO: 1757 - DNA, 963 bp, synthetic construct
  misc_feature 1..963: note = variant of adenosine kinase from Xanthemonas campestris
  source 1..963: mol_type = other DNA
atgcatcatcaccatcaccatggggggtccggtatgagtgcactcatttgcggttctttagcgtatgataacatcatgtggtttccggactatttcaagaaccatattctgcccgatcgtgttcatcgcctcaatgtcagctttctggtatttgacatgcgtcgtgaatttggaggctgtgccggcaacattgcgtacaatctgcatctgttgggtggtcgcccgatcgtaatggctacggtgggccaagatttcggtccgtatcgcgaacacttcgaaactctgggcattgacttatcccgcgtcaagatcatcgatgatctgagtacaccgcaggggttcattaccaccgacatggatcaaaaccagattacggcgtttcacagcggcgcaatgatgcgttcgtacgaaaatcacgttcgtgatgtgccgggtgttaccttgggcctcgtaggtcctgatggacgcgagggcatgatccaaaatgccgaagaatttgctgctatgggcattccgttcatttttgacccaggtcaggcagtgcctctgttcagcggcccggaactgcgcgaatttatcgaacaggcggactatgtggtggtcaacgattacgaaagccgccttcttcaagcccgtactggctggaacgaggatgacattgttagccgcgtgcaggcgtatatcaccacgcaaggttcggctggagccgtggtaatgacaccggagaagcgctacgttattccggctgctaaaactcgtcgtgtcgttgatccaactggttgcggcgacgcgtttcgcgccggcctgatctatggtattcagcatgaatatgattggttgaccattggccgcatgggaaacttaatgggtgcgctgaaagtggaacaccctggcacccaaaatcagcgtttcacctttgccgaattcaacgaccggttcaaacaatattttggctacgcgctc

SEQ ID NO: 1758 - protein, 321 aa, synthetic construct
  REGION 1..321: note = variant of adenosine kinase from Xanthemonas campestris
MHHHHHHGGSGMSALICGSLAYDNIMWFPDYFKNHILPDRVHRLNVSFLVFDMRREFGGCAGNIAYNLHLLGGRPIVMATVGQDFGPYREHFETLGIDLSRVKIIDDLSTPQGFITTDMDQNQITAFHSGAMMRSYENHVRDVPGVTLGLVGPDGREGMIQNAEEFAAMGIPFIFDPGQAVPLFSGPELREFIEQADYVVVNDYESRLLQARTGWNEDDIVSRVQAYITTQGSAGAVVMTPEKRYVIPAAKTRRVVDPTGCGDAFRAGLIYGIQHEYDWLTIGRMGNLMGALKVEHPGTQNQRFTFAEFNDRFKQYFGYAL

SEQ ID NO: 1759 - DNA, 963 bp, synthetic construct
  misc_feature 1..963: note = variant of adenosine kinase from Xanthemonas campestris
  source 1..963: mol_type = other DNA
atgcatcatcaccatcaccatggggggtccggtatgagtgcactcatttgcggttctttagcgtatgataacatcatgaaatttccggactatttcaagaactatattctgcccgatcgtgttcaccgcctcaatgtcagctttctggtatttgacatgcgtcgtgaatttggaggctgtgccggcaacattgcgtacaatctgcatctgttgggtggtcgcccgatcgtaatggctacggtgggccaagatttcggtccgtatcgcgaacacttcgaaactctgggcattgacttatcccgcgtcaagatcatcccggatctgagtacaccgcaggggttcattaccaccgacatggatcaaaaccagattacggcgtttcacagcggcgcaatgatgcgttcgtacgaaaatcacgttcgtgatgtgccgggtgttaccttgggcctcgtaggtcctgatggacgcgagggcatgatccaaaatgccgaagaatttgctgctatgggcattccgttcatttttgacccaggtcaggcagtgcctctgttcagcggcccggaactgcgcgaatttatcgaacaggcggactatgtggtggtcaacgattacgaaagccgccttcttcaagcccgtactggctggaacgaggatgacattgttagccgcgtgcaggcgtatatcaccacgcaaggttcggctggagccgtggtaatgacaccggagaagcgctacgttattccggctgctaaaactcgtcgtgtcgttgatccaactggttgcggcgacgcgtttcgcgccggcctgatctatggtattcagcatgaatatgattggttgaccattggccgcatgggaaacttaatgggtgcgctgaaagtggaacaccctggcacccaaaatcagcgtttcgattttgccgaattcaacgaccggttcaaacaatattttggctacgcgctc

SEQ ID NO: 1760 - protein, 321 aa, synthetic construct
  REGION 1..321: note = variant of adenosine kinase from Xanthemonas campestris
MHHHHHHGGSGMSALICGSLAYDNIMKFPDYFKNYILPDRVHRLNVSFLVFDMRREFGGCAGNIAYNLHLLGGRPIVMATVGQDFGPYREHFETLGIDLSRVKIIPDLSTPQGFITTDMDQNQITAFHSGAMMRSYENHVRDVPGVTLGLVGPDGREGMIQNAEEFAAMGIPFIFDPGQAVPLFSGPELREFIEQADYVVVNDYESRLLQARTGWNEDDIVSRVQAYITTQGSAGAVVMTPEKRYVIPAAKTRRVVDPTGCGDAFRAGLIYGIQHEYDWLTIGRMGNLMGALKVEHPGTQNQRFDFAEFNDRFKQYFGYAL

SEQ ID NO: 1761 - DNA, 963 bp, synthetic construct
  misc_feature 1..963: note = variant of adenosine kinase from Xanthemonas campestris
  source 1..963: mol_type = other DNA
atgcatcatcaccatcaccatggggggtccggtatgagtgcactcatttgcggttctttagcgtatgataacatcatgtggtttccggactatttcaagaaccatattctgcccgatcgtgttcaccgcctcaatgtcagctttctggtatttgacatgcgtcgtgaatttggaggctgtgccggcaacattgcgtacaatctgcatctgttgggtggtcgcccgatcgtaatggctacggtgggccaagatttcggtccgtatcgcgaacacttcgaaactctgggcattgacttatcccgcgtcaagatcatcgatgatctgagtacaccgcaggggttcattaccaccgacatggatcaaaaccagattacggcgtttcacagcggcgcaatgatgcgttcgtacgaaaatcacgttcgtgatgtgccgggtgttaccttgggcctcgtaggtcctgatggacgcgagggcatgatccaaaatgccgaagaatttgctgctatgggcattccgttcatttttgacccaggtcaggcagtgcctctgttcagcggcccggaactgcgcgaatttatcgaacaggcggactatgtggtggtcaacgattacgaaagccgccttcttcaagcccgtactggctggaacgaggatgacattgttagccgcgtgcaggcgtatatcaccacgcaaggttcggctggagccgtggtaatgacaccggagaagcgctacgttattccggctgctaaaactcgtcgtgtcgttgatccaactggttgcggcgacgcgtttcgcgccggcctgatctatggtattcagcatgaatatgattggttgaccattggccgcatgggaaacttaatgggtgcgctgaaagtggaacaccctggcacccaaaatcagcgtttcgattttgccgaattcaacgaccggttcaaacaatattttggctacgcgctc

SEQ ID NO: 1762 - protein, 321 aa, synthetic construct
  REGION 1..321: note = variant of adenosine kinase from Xanthemonas campestris
MHHHHHHGGSGMSALICGSLAYDNIMWFPDYFKNHILPDRVHRLNVSFLVFDMRREFGGCAGNIAYNLHLLGGRPIVMATVGQDFGPYREHFETLGIDLSRVKIIDDLSTPQGFITTDMDQNQITAFHSGAMMRSYENHVRDVPGVTLGLVGPDGREGMIQNAEEFAAMGIPFIFDPGQAVPLFSGPELREFIEQADYVVVNDYESRLLQARTGWNEDDIVSRVQAYITTQGSAGAVVMTPEKRYVIPAAKTRRVVDPTGCGDAFRAGLIYGIQHEYDWLTIGRMGNLMGALKVEHPGTQNQRFDFAEFNDRFKQYFGYAL

SEQ ID NO: 1763 - DNA, 963 bp, synthetic construct
  misc_feature 1..963: note = variant of adenosine kinase from Xanthemonas campestris
  source 1..963: mol_type = other DNA
atgcatcatcaccatcaccatggggggtccggtatgagtgcactcatttgcggttctttagcgtatgataacatcatgtggtttccggactatttcaagaaccatattctgcccgatcgtgttcaccgcctcaatgtcagctttctggtatttgacatgcgtcgtgaatttggaggctgtgccggcaacattgcgtacaatctgcatctgttgggtggtcgcccgatcgtaatggctacggtgggccaagatttcggtccgtatcgcgaacacttcgaaactctgggcattgacttatcccgcgtcaagatcatcgatgatctgagtacaccgcaggggttcattaccaccgacatggatcaaaaccagattacggcgtttcacagcggcgcaatgatgcgttcgtacgaaaatcacgttcgtgatgtgccgggtgttaccttgggcctcgtaggtcctgatggacgcgagggcatgatccaaaatgccgaagaatttgctgctatgggcattccgttcatttttgacccaggtcaggcagtgcctctgttcagcggcccggaactgcgcgaatttatcgaacaggcggactatgtggtggtcaacgattacgaaagccgccttcttcaagcccgtactggctggaacgagcaggacattgttagccgcgtgcaggcgtatatcaccacgcaaggttcggctggagccgtggtaatgacaccggagaagcgctacgttattccggctgctaaaactcgtcgtgtcgttgatccaactggttgcggcgacgcgtttcgcgccggcctgatctatggtattcagcatgaatatgattggttgaccattggccgcatgggaaacttaatgggtgcgctgaaagtggaacaccctggcacccaaaatcagcgtttcgattttgccgaattcaacgaccggttcaaacaatattttggctacgcgctc

SEQ ID NO: 1764 - protein, 321 aa, synthetic construct
  REGION 1..321: note = variant of adenosine kinase from Xanthemonas campestris
MHHHHHHGGSGMSALICGSLAYDNIMWFPDYFKNHILPDRVHRLNVSFLVFDMRREFGGCAGNIAYNLHLLGGRPIVMATVGQDFGPYREHFETLGIDLSRVKIIDDLSTPQGFITTDMDQNQITAFHSGAMMRSYENHVRDVPGVTLGLVGPDGREGMIQNAEEFAAMGIPFIFDPGQAVPLFSGPELREFIEQADYVVVNDYESRLLQARTGWNEQDIVSRVQAYITTQGSAGAVVMTPEKRYVIPAAKTRRVVDPTGCGDAFRAGLIYGIQHEYDWLTIGRMGNLMGALKVEHPGTQNQRFDFAEFNDRFKQYFGYAL

SEQ ID NO: 1765 - DNA, 963 bp, synthetic construct
  misc_feature 1..963: note = variant of adenosine kinase from Xanthemonas campestris
  source 1..963: mol_type = other DNA
atgcatcatcaccatcaccatggggggtccggtatgagtgcactcatttgcggttctttagcgtatgataacatcatgtggtttccggactatttcaagaaccatattctgcccgatcgtgttcaccgcctcaatgtcagctttctggtatttgacatgcgtcgtgaatttggaggctgtgccggcaacattgcgtacaatctgcatctgttgggtggtcgcccgatcgtaatggctacggtgggccaagatttcggtccgtatcgcgaacacttcgaaactctgggcattgacttatcccgcgtcaagatcatcgatgatctgagtacaccgcaggggttcattaccaccgacatggatcaaaaccagattacggcgtttcacagcggcgcaatgatgcgttcgtacgaaaatcacgttcgtgatgtgccgggtgttaccttgggcctcgtaggtcctgatggacgcgagggcatgatccaaaatgccgaagaatttgctgctatgggcattccgttcatttttgacccaggtcaggcagtgcctctgttcagcggcccggaactgcgcgaatttatcgaacaggcggactatgtggtggtcaacgattacgaaagccgccttcttcaagcccgtactggctggaacgagcaggacattgttagccgcgtgcaggcgtatatcaccacgcaaggttcggctggagccgtggtaatgacaccggagaagcgctacgttattccggctgctaaaactcgtcgtgtcgttgatccaactggttgcggcgacgcgtttcgcgccggcctgatctatggtattcagcatgaatatgattggttgaccattggccgcatgggaaacttaatgggtgcgctgaaagtggaacaccctggcacccaaaatcagcgtttcacctttgccgaattcaacgaccggttcaaacaatattttggctacgcgctc

SEQ ID NO: 1766 - protein, 321 aa, synthetic construct
  REGION 1..321: note = variant of adenosine kinase from Xanthemonas campestris
MHHHHHHGGSGMSALICGSLAYDNIMWFPDYFKNHILPDRVHRLNVSFLVFDMRREFGGCAGNIAYNLHLLGGRPIVMATVGQDFGPYREHFETLGIDLSRVKIIDDLSTPQGFITTDMDQNQITAFHSGAMMRSYENHVRDVPGVTLGLVGPDGREGMIQNAEEFAAMGIPFIFDPGQAVPLFSGPELREFIEQADYVVVNDYESRLLQARTGWNEQDIVSRVQAYITTQGSAGAVVMTPEKRYVIPAAKTRRVVDPTGCGDAFRAGLIYGIQHEYDWLTIGRMGNLMGALKVEHPGTQNQRFTFAEFNDRFKQYFGYAL

SEQ ID NO: 1767 - DNA, 963 bp, synthetic construct
  misc_feature 1..963: note = variant of adenosine kinase from Xanthemonas campestris
  source 1..963: mol_type = other DNA
atgcatcatcaccatcaccatggggggtccggtatgagtgcactcatttgcggttctttagcgtatgataacatcatgtggtttccggactatttcaagaaccatattctgcccgatcgtgttcaccgcctcaatgtcagctttctggtatttgacatgcgtcgtgaatttggaggctgtgccggcaacattgcgtacaatctgcatctgttgggtggtcgcccgatcgtaatggctacggtgggccaagatttcggtccgtatcgcgaacacttcgaaactctgggcattgacttatcccgcgtcaagatcatcccggatctgagtacaccgcaggggttcattaccaccgacatggatcaaaaccagattacggcgtttcacagcggcgcaatgatgcgttcgtacgaaaatcacgttcgtgatgtgccgggtgttaccttgggcctcgtaggtcctgatggacgcgagggcatgatccaaaatgccgaagaatttgctgctatgggcattccgttcatttttgacccaggtcaggcagtgcctctgttcagcggcccggaactgcgcgaatttatcgaacaggcggactatgtggtggtcaacgattacgaaagccgccttcttcaagcccgtactggctggaacgaggatgacattgttagccgcgtgcaggcgtatatcaccacgcaaggttcggctggagccgtggtaatgacaccggagaagcgctacgttattccggctgctaaaactcgtcgtgtcgttgatccaactggttgcggcgacgcgtttcgcgccggcctgatctatggtattcagcatgaatatgattggttgaccattggccgcatgggaaacttaatgggtgcgctgaaagtggaacaccctggcacccaaaatcagcgtttcgattttgccgaattcaacgaccggttcaaacaatattttggctacgcgctc

SEQ ID NO: 1768 - protein, 321 aa, synthetic construct
  REGION 1..321: note = variant of adenosine kinase from Xanthemonas campestris
MHHHHHHGGSGMSALICGSLAYDNIMWFPDYFKNHILPDRVHRLNVSFLVFDMRREFGGCAGNIAYNLHLLGGRPIVMATVGQDFGPYREHFETLGIDLSRVKIIPDLSTPQGFITTDMDQNQITAFHSGAMMRSYENHVRDVPGVTLGLVGPDGREGMIQNAEEFAAMGIPFIFDPGQAVPLFSGPELREFIEQADYVVVNDYESRLLQARTGWNEDDIVSRVQAYITTQGSAGAVVMTPEKRYVIPAAKTRRVVDPTGCGDAFRAGLIYGIQHEYDWLTIGRMGNLMGALKVEHPGTQNQRFDFAEFNDRFKQYFGYAL

SEQ ID NO: 1769 - DNA, 963 bp, synthetic construct
  misc_feature 1..963: note = variant of adenosine kinase from Xanthemonas campestris
  source 1..963: mol_type = other DNA
atgcatcatcaccatcaccatggggggtccggtatgagtgcactcatttgcggttctttagcgtatgataacatcatgtggtttccggactatttcaagaaccatattctgcccgatcgtgttcaccgcctcaatgtcagctttctggtatttgacatgcgtcgtgaatttggaggctgtgccggcaacattgcgtacaatctgcatctgttgggtggtcgcccgatcgtaatggctacggtgggccaagatttcggtccgtatcgcgaacacttcgaaactctgggcattgacttatcccgcgtcaagatcatcgatgatctgagtacaccgcaggggttcattaccaccgacatggatcaaaaccagattacggcgtttcacagcggcgcaatgatgcgttcgtacgaaaatcacgttcgtgatgtgccgggtgttaccttgggcctcgtaggtcctgatggacgcgagggcatgatccaaaatgccgaagaatttgctgctatgggcattccgttcatttttgacccaggtcaggcagtgcctctgttcagcggcccggaactgcgcgaatttatcgaacaggcggactatgtggtggtcaacgattacgaaagccgccttcttcaagcccgtactggctggaacgaggatgacattgttagccgcgtgcaggcgtatatcaccacgcaaggttcggctggagccgtggtaatgacaccggagaagcgctacgttattccggctgctaaaactcgtcgtgtcgttgatccaactggttgcggcgacgcgtttcgcgccggcctgatctatggtattcagcatgaatatgattggttgaccattggccgcatgggaaacttaatgggtgcgctgaaagtggaacaccctggcacccaaaatcagcgtttcgattttgccgaattcaacgaccagttcaaacaatattttggctacgcgctc

SEQ ID NO: 1770 - protein, 321 aa, synthetic construct
  REGION 1..321: note = variant of adenosine kinase from Xanthemonas campestris
MHHHHHHGGSGMSALICGSLAYDNIMWFPDYFKNHILPDRVHRLNVSFLVFDMRREFGGCAGNIAYNLHLLGGRPIVMATVGQDFGPYREHFETLGIDLSRVKIIDDLSTPQGFITTDMDQNQITAFHSGAMMRSYENHVRDVPGVTLGLVGPDGREGMIQNAEEFAAMGIPFIFDPGQAVPLFSGPELREFIEQADYVVVNDYESRLLQARTGWNEDDIVSRVQAYITTQGSAGAVVMTPEKRYVIPAAKTRRVVDPTGCGDAFRAGLIYGIQHEYDWLTIGRMGNLMGALKVEHPGTQNQRFDFAEFNDQFKQYFGYAL

SEQ ID NO: 1771 - DNA, 963 bp, synthetic construct
  misc_feature 1..963: note = variant of adenosine kinase from Xanthemonas campestris
  source 1..963: mol_type = other DNA
atgcatcatcaccatcaccatggggggtccggtatgagtgcactcatttgcggttctttagcgtatgataacatcatgtggtttccggactatttcaagaaccatattctgcccgatcgtgttcaccgcctcaatgtcagctttctggtatttgacatgcgtcgtgaatttggaggctgtgccggcaacattgcgtacaatctgcatctgttgggtggtcgcccgatcgtaatggctacggtgggccaagatttcggtccgtatcgcgaacacttcgaaactctgggcattgacttatcccgcgtcaagatcatcccggatctgagtacaccgcaggggttcattaccaccgacatggatcaaaaccagattacggcgtttcacagcggcgcaatgatgcgttcgtacgaaaatcacgttcgtgatgtgccgggtgttaccttgggcctcgtaggtcctgatggacgcgagggcatgatccaaaatgccgaagaatttgctgctatgggcattccgttcatttttgacccaggtcaggcagtgcctctgttcagcggcccggaactgcgcgaatttatcgaacaggcggactatgtggtggtcaacgattacgaaagccgccttcttcaagcccgtactggctggaacgagcaggacattgttagccgcgtgcaggcgtatatcaccacgcaaggttcggctggagccgtggtaatgacaccggagaagcgctacgttattccggctgctaaaactcgtcgtgtcgttgatccaactggttgcggcgacgcgtttcgcgccggcctgatctatggtattcagcatgaatatgattggttgaccattggccgcatgggaaacttaatgggtgcgctgaaagtggaacaccctggcacccaaaatcagcgtttcgattttgccgaattcaacgaccggttcaaacaatattttggctacgcgctc

SEQ ID NO: 1772 - protein, 321 aa, synthetic construct
  REGION 1..321: note = variant of adenosine kinase from Xanthemonas campestris
MHHHHHHGGSGMSALICGSLAYDNIMWFPDYFKNHILPDRVHRLNVSFLVFDMRREFGGCAGNIAYNLHLLGGRPIVMATVGQDFGPYREHFETLGIDLSRVKIIPDLSTPQGFITTDMDQNQITAFHSGAMMRSYENHVRDVPGVTLGLVGPDGREGMIQNAEEFAAMGIPFIFDPGQAVPLFSGPELREFIEQADYVVVNDYESRLLQARTGWNEQDIVSRVQAYITTQGSAGAVVMTPEKRYVIPAAKTRRVVDPTGCGDAFRAGLIYGIQHEYDWLTIGRMGNLMGALKVEHPGTQNQRFDFAEFNDRFKQYFGYAL

SEQ ID NO: 1773 - DNA, 963 bp, synthetic construct
  misc_feature 1..963: note = variant of adenosine kinase from Xanthemonas campestris
  source 1..963: mol_type = other DNA
atgcatcatcaccatcaccatggggggtccggtatgagtgcactcatttgcggttctttagcgtatgataacatcatggtgtttccggactatttcaagaactatattctgcccgatcgtgttcaccgcctcaatgtcagctttctggtatttgacatgcgtcgtgaatttggaggctgtgccggcaacattgcgtacaatctgcatctgttgggtggtcgcccgatcgtaatggctacggtgggccaagatttcggtccgtatcgcgaacacttcgaaactctgggcattgacttatcccgcgtcaagatcatcgatgatctgagtacaccgcaggggttcattaccaccgacatggatcaaaaccagattacggcgtttcacagcggcgcaatgatgcgttcgtacgaaaatcacgttcgtgatgtgccgggtgttaccttgggcctcgtaggtcctgatggacgcgagggcatgatccaaaatgccgaagaatttgctgctatgggcattccgttcatttttgacccaggtcaggcagtgcctctgttcagcggcccggaactgcgcgaatttatcgaacaggcggactatgtggtggtcaacgattacgaaagccgccttcttcaagcccgtactggctggaacgagcaggacattgttagccgcgtgcaggcgtatatcaccacgcaaggttcggctggagccgtggtaatgacaccggagaagcgctacgttattccggctgctaaaactcgtcgtgtcgttgatccaactggttgcggcgacgcgtttcgcgccggcctgatctatggtattcagcatgaatatgattggttgaccattggccgcatgggaaacttaatgggtgcgctgaaagtggaacaccctggcacccaaaatcagcgtttcacctttgccgaattcaacgaccagttcaaacaatattttggctacgcgctc

SEQ ID NO: 1774 - protein, 321 aa, synthetic construct
  REGION 1..321: note = variant of adenosine kinase from Xanthemonas campestris
MHHHHHHGGSGMSALICGSLAYDNIMVFPDYFKNYILPDRVHRLNVSFLVFDMRREFGGCAGNIAYNLHLLGGRPIVMATVGQDFGPYREHFETLGIDLSRVKIIDDLSTPQGFITTDMDQNQITAFHSGAMMRSYENHVRDVPGVTLGLVGPDGREGMIQNAEEFAAMGIPFIFDPGQAVPLFSGPELREFIEQADYVVVNDYESRLLQARTGWNEQDIVSRVQAYITTQGSAGAVVMTPEKRYVIPAAKTRRVVDPTGCGDAFRAGLIYGIQHEYDWLTIGRMGNLMGALKVEHPGTQNQRFTFAEFNDQFKQYFGYAL

SEQ ID NO: 1775 - DNA, 963 bp, synthetic construct
  misc_feature 1..963: note = variant of adenosine kinase from Xanthemonas campestris
  source 1..963: mol_type = other DNA
atgcatcatcaccatcaccatggggggtccggtatgagtgcactcatttgcggttctttagcgtatgataacatcatgtggtttccggactatttcaagaaccatattctgcccgatcgtgttcaccgcctcaatgtcagctttctggtatttgacatgcgtcgtgaatttggaggctgtgccggcaacattgcgtacaatctgcatctgttgggtggtcgcccgatcgtaatggctacggtgggccaagatttcggtccgtatcgcgaacacttcgaaactctgggcattgacttatcccgcgtcaagatcatcgatgatctgagtacaccgcaggggttcattaccaccgacatggatcaaaaccagattacggcgtttcacagcggcgcaatgatgcgttcgtacgaaaatcacgttcgtgatgtgtcgggtgttaccttgggcctcgtaggtcctgatggacgcgagggcatgatccaaaatgccgaagaatttgctgctatgggcattccgttcatttttgacccaggtcaggcagtgcctctgttcagcggcccggaactgcgcgaatttatcgaacaggcggactatgtggtggtcaacgattacgaaagccgccttcttcaagcccgtactggctggaacgagcaggacattgttagccgcgtgcaggcgtatatcaccacgcaaggttcggctggagccgtggtaatgacaccggagaagcgctacgttattccggctgctaaaactcgtcgtgtcgttgatccaactggttgcggcgacgcgtttcgcgccggcctgatctatggtattcagcatgaatatgattggttgaccattggccgcatgggaaacttaatgggtgcgctgaaagtggaacaccctggcacccaaaatcagcgtttcgattttgccgaattcaacgaccggttcaaacaatattttggctacgcgctc

SEQ ID NO: 1776 - protein, 321 aa, synthetic construct
  REGION 1..321: note = variant of adenosine kinase from Xanthemonas campestris
MHHHHHHGGSGMSALICGSLAYDNIMWFPDYFKNHILPDRVHRLNVSFLVFDMRREFGGCAGNIAYNLHLLGGRPIVMATVGQDFGPYREHFETLGIDLSRVKIIDDLSTPQGFITTDMDQNQITAFHSGAMMRSYENHVRDVSGVTLGLVGPDGREGMIQNAEEFAAMGIPFIFDPGQAVPLFSGPELREFIEQADYVVVNDYESRLLQARTGWNEQDIVSRVQAYITTQGSAGAVVMTPEKRYVIPAAKTRRVVDPTGCGDAFRAGLIYGIQHEYDWLTIGRMGNLMGALKVEHPGTQNQRFDFAEFNDRFKQYFGYAL

SEQ ID NO: 1777 - DNA, 963 bp, synthetic construct
  misc_feature 1..963: note = variant of adenosine kinase from Xanthemonas campestris
  source 1..963: mol_type = other DNA
atgcatcatcaccatcaccatggggggtccggtatgagtgcactcatttgcggttctttagcgtatgataacatcatgtggtttccggactatttcaagaaccatattctgcccgatcgtgttcaccgcctcaatgtcagctttctggtatttgacatgcgtcgtgaatttggaggctgtgccggcaacattgcgtacaatctgcatctgttgggtggtcgcccgatcgtaatggctacggtgggccaagatttcggtccgtatcgcgaacacttcgaaactctgggcattgacttatcccgcgtcaagatcatcgatgatctgagtacaccgcaggggttcattaccaccgacatggatcaaaaccagattacggcgtttcacagcggcgcaatgatgcgttcgtacgaaaatcacgttcgtgatgtgccgggtgttaccttgggcctcgtaggtcctgatggacgcgagggcatgatccaaaatgccgaagaatttgctgctatgggcattccgttcatttttgacccaggtcaggcagtgcctctgttcagcggcccggaactgcgcgaatttatcgaacaggcggactatgtggtggtcaacgattacgaaagccgccttcttcaagcccgtactggctggaacgaggatgacattgttagccgcgtgcaggcgtatatcaccacgcaaggttcggctggagccgtggtaatgacaccggagaagcgctacgttattccggctgctaaaactcgtcgtgtcgttgatccaactggttgcggcgacgcgtttcgcgccggcctgatctatggtattcagcatgaatatgattggttgaccattggccgcatgggaaacttaatgggtgcgctgaaagtggaacaccctggcacccaaaatcagcgtttcagctttgccgaattcaacgaccagttcaaacaatattttggctacgcgctc

SEQ ID NO: 1778 - protein, 321 aa, synthetic construct
  REGION 1..321: note = variant of adenosine kinase from Xanthemonas campestris
MHHHHHHGGSGMSALICGSLAYDNIMWFPDYFKNHILPDRVHRLNVSFLVFDMRREFGGCAGNIAYNLHLLGGRPIVMATVGQDFGPYREHFETLGIDLSRVKIIDDLSTPQGFITTDMDQNQITAFHSGAMMRSYENHVRDVPGVTLGLVGPDGREGMIQNAEEFAAMGIPFIFDPGQAVPLFSGPELREFIEQADYVVVNDYESRLLQARTGWNEDDIVSRVQAYITTQGSAGAVVMTPEKRYVIPAAKTRRVVDPTGCGDAFRAGLIYGIQHEYDWLTIGRMGNLMGALKVEHPGTQNQRFSFAEFNDQFKQYFGYAL

SEQ ID NO: 1779 - DNA, 963 bp, synthetic construct
  misc_feature 1..963: note = variant of adenosine kinase from Xanthemonas campestris
  source 1..963: mol_type = other DNA
atgcatcatcaccatcaccatggggggtccggtatgagtgcactcatttgcggttctttagcgtatgataacatcatggtgtttccggactatttcaagaactatattctgcccgatcgtgttcaccgcctcaatgtcagctttctggtatttgacatgcgtcgtgaatttggaggctgtgccggcaacattgcgtacaatctgcatctgttgggtggtcgcccgatcgtaatggctacggtgggccaagatttcggtccgtatcgcgaacacttcgaaactctgggcattgacttatcccgcgtcaagatcatcgatgatctgagtacaccgcaggggttcattaccaccgacatggatcaaaaccagattacggcgtttcacagcggcgcaatgatgcgttcgtacgaaaatcacgttcgtgatgtgccgggtgttaccttgggcctcgtaggtcctgatggacgcgagggcatgatccaaaatgccgaagaatttgctgctatgggcattccgttcatttttgacccaggtcaggcagtgcctctgttcagcggcccggaactgcgcgaatttatcgaacaggcggactatgtggtggtcaacgattacgaaagccgccttcttcaagcccgtactggctggaacgagcaggacattgttagccgcgtgcaggcgtatatcaccacgcaaggttcggctggagccgtggtaatgacaccggagaagcgctacgttattccggctgctaaaactcgtcgtgtcgttgatccaactggttgcggcgacgcgtttcgcgccggcctgatctatggtattcagcatgaatatgattggttgaccattggccgcatgggaaacttaatgggtgcgctgaaagtggaacaccctggcacccaaaatcagcgtttcgattttgccgaattcaacgaccggttcaaacaatattttggctacgcgctc

SEQ ID NO: 1780 - protein, 321 aa, synthetic construct
  REGION 1..321: note = variant of adenosine kinase from Xanthemonas campestris
MHHHHHHGGSGMSALICGSLAYDNIMVFPDYFKNYILPDRVHRLNVSFLVFDMRREFGGCAGNIAYNLHLLGGRPIVMATVGQDFGPYREHFETLGIDLSRVKIIDDLSTPQGFITTDMDQNQITAFHSGAMMRSYENHVRDVPGVTLGLVGPDGREGMIQNAEEFAAMGIPFIFDPGQAVPLFSGPELREFIEQADYVVVNDYESRLLQARTGWNEQDIVSRVQAYITTQGSAGAVVMTPEKRYVIPAAKTRRVVDPTGCGDAFRAGLIYGIQHEYDWLTIGRMGNLMGALKVEHPGTQNQRFDFAEFNDRFKQYFGYAL

SEQ ID NO: 1781 - DNA, 963 bp, synthetic construct
  misc_feature 1..963: note = variant of adenosine kinase from Xanthemonas campestris
  source 1..963: mol_type = other DNA
atgcatcatcaccatcaccatggggggtccggtatgagtgcactcatttgcggttctttagcgtatgataacatcatgtggtttccggactatttcaagaaccatattctgcccgatcgtgttcaccgcctcaatgtcagctttctggtatttgacatgcgtcgtgaatttggaggctgtgccggcaacattgcgtacaatctgcatctgttgggtggtcgcccgatcgtaatggctacggtgggccaagatttcggtccgtatcgcgaacacttcgaaactctgggcattgacttatcccgcgtcaagatcatcccggatctgagtacaccgcaggggttcattaccaccgacatggatcaaaaccagattacggcgtttcacagcggcgcaatgatgcgttcgtacgaaaatcacgttcgtgatgtgccgggtgttaccttgggcctcgtaggtcctgatggacgcgagggcatgatccaaaatgccgaagaatttgctgctatgggcattccgttcatttttgacccaggtcaggcagtgcctctgttcagcggcccggaactgcgcgaatttatcgaacaggcggactatgtggtggtcaacgattacgaaagccgccttcttcaagcccgtactggctggaacgaggatgacattgttagccgcgtgcaggcgtatatcaccacgcaaggttcggctggagccgtggtaatgacaccggagaagcgctacgttattccggctgctaaaactcgtcgtgtcgttgatccaactggttgcggcgacgcgtttcgcgccggcctgatctatggtattcagcatgaatatgattggttgaccattggccgcatgggaaacttaatgggtgcgctgaaagtggaacaccctggcacccaaaatcagcgtttcagctttgccgaattcaacgaccggttcaaacaatattttggctacgcgctc

SEQ ID NO: 1782 - protein, 321 aa, synthetic construct
  REGION 1..321: note = variant of adenosine kinase from Xanthemonas campestris
MHHHHHHGGSGMSALICGSLAYDNIMWFPDYFKNHILPDRVHRLNVSFLVFDMRREFGGCAGNIAYNLHLLGGRPIVMATVGQDFGPYREHFETLGIDLSRVKIIPDLSTPQGFITTDMDQNQITAFHSGAMMRSYENHVRDVPGVTLGLVGPDGREGMIQNAEEFAAMGIPFIFDPGQAVPLFSGPELREFIEQADYVVVNDYESRLLQARTGWNEDDIVSRVQAYITTQGSAGAVVMTPEKRYVIPAAKTRRVVDPTGCGDAFRAGLIYGIQHEYDWLTIGRMGNLMGALKVEHPGTQNQRFSFAEFNDRFKQYFGYAL

SEQ ID NO: 1783 - DNA, 963 bp, synthetic construct
  misc_feature 1..963: note = variant of adenosine kinase from Xanthemonas campestris
  source 1..963: mol_type = other DNA
atgcatcatcaccatcaccatggggggtccggtatgagtgcactcatttgcggttctttagcgtatgataacatcatgtggtttccggactatttcaagaactatattctgcccgatcgtgttcaccgcctcaatgtcagctttctggtatttgacatgcgtcgtgaatttggaggctgtgccggcaacattgcgtacaatctgcatctgttgggtggtcgcccgatcgtaatggctacggtgggccaagatttcggtccgtatcgcgaacacttcgaaactctgggcattgacttatcccgcgtcaagatcatcccggatctgagtacaccgcaggggttcattaccaccgacatggatcaaaaccagattacggcgtttcacagcggcgcaatgatgcgttcgtacgaaaatcacgttcgtgatgtgccgggtgttaccttgggcctcgtaggtcctgatggacgcgagggcatgatccaaaatgccgaagaatttgctgctatgggcattccgttcatttttgacccaggtcaggcagtgcctctgttcagcggcccggaactgcgcgaatttatcgaacaggcggactatgtggtggtcaacgattacgaaagccgccttcttcaagcccgtactggctggaacgagcaggacattgttagccgcgtgcaggcgtatatcaccacgcaaggttcggctggagccgtggtaatgacaccggagaagcgctacgttattccggctgctaaaactcgtcgtgtcgttgatccaactggttgcggcgacgcgtttcgcgccggcctgatctatggtattcagcatgaatatgattggttgaccattggccgcatgggaaacttaatgggtgcgctgaaagtggaacaccctggcacccaaaatcagcgtttcgattttgccgaattcaacgaccggttcaaacaatattttggctacgcgctc

SEQ ID NO: 1784 - protein, 321 aa, synthetic construct
  REGION 1..321: note = variant of adenosine kinase from Xanthemonas campestris
MHHHHHHGGSGMSALICGSLAYDNIMWFPDYFKNYILPDRVHRLNVSFLVFDMRREFGGCAGNIAYNLHLLGGRPIVMATVGQDFGPYREHFETLGIDLSRVKIIPDLSTPQGFITTDMDQNQITAFHSGAMMRSYENHVRDVPGVTLGLVGPDGREGMIQNAEEFAAMGIPFIFDPGQAVPLFSGPELREFIEQADYVVVNDYESRLLQARTGWNEQDIVSRVQAYITTQGSAGAVVMTPEKRYVIPAAKTRRVVDPTGCGDAFRAGLIYGIQHEYDWLTIGRMGNLMGALKVEHPGTQNQRFDFAEFNDRFKQYFGYAL

SEQ ID NO: 1785 - DNA, 963 bp, synthetic construct
  misc_feature 1..963: note = variant of adenosine kinase from Xanthemonas campestris
  source 1..963: mol_type = other DNA
atgcatcatcaccatcaccatggggggtccggtatgagtgcactcatttgcggttctttagcgtatgataacatcatggtgtttccggactatttcaagaaccatattctgcccgatcgtgttcaccgcctcaatgtcagctttctggtatttgacatgcgtcgtgaatttggaggctgtgccggcaacattgcgtacaatctgcatctgttgggtggtcgcccgatcgtaatggctacggtgggccaagatttcggtccgtatcgcgaacacttcgaaactctgggcattgacttatcccgcgtcaagatcatcccggatctgagtacaccgcaggggttcattaccaccgacatggatcaaaaccagattacggcgtttcacagcggcgcaatgatgcgttcgtacgaaaatcacgttcgtgatgtgccgggtgttaccttgggcctcgtaggtcctgatggacgcgagggcatgatccaaaatgccgaagaatttgctgctatgggcattccgttcatttttgacccaggtcaggcagtgcctctgttcagcggcccggaactgcgcgaatttatcgaacaggcggactatgtggtggtcaacgattacgaaagccgccttcttcaagcccgtactggctggaacgaggatgacattgttagccgcgtgcaggcgtatatcaccacgcaaggttcggctggagccgtggtaatgacaccggagaagcgctacgttattccggctgctaaaactcgtcgtgtcgttgatccaactggttgcggcgacgcgtttcgcgccggcctgatctatggtattcagcatgaatatgattggttgaccattggccgcatgggaaacttaatgggtgcgctgaaagtggaacaccctggcacccaaaatcagcgtttcacctttgccgaattcaacgaccagttcaaacaatattttggctacgcgctc

SEQ ID NO: 1786 - protein, 321 aa, synthetic construct
  REGION 1..321: note = variant of adenosine kinase from Xanthemonas campestris
MHHHHHHGGSGMSALICGSLAYDNIMVFPDYFKNHILPDRVHRLNVSFLVFDMRREFGGCAGNIAYNLHLLGGRPIVMATVGQDFGPYREHFETLGIDLSRVKIIPDLSTPQGFITTDMDQNQITAFHSGAMMRSYENHVRDVPGVTLGLVGPDGREGMIQNAEEFAAMGIPFIFDPGQAVPLFSGPELREFIEQADYVVVNDYESRLLQARTGWNEDDIVSRVQAYITTQGSAGAVVMTPEKRYVIPAAKTRRVVDPTGCGDAFRAGLIYGIQHEYDWLTIGRMGNLMGALKVEHPGTQNQRFTFAEFNDQFKQYFGYAL

SEQ ID NO: 1787 - DNA, 963 bp, synthetic construct
  misc_feature 1..963: note = variant of adenosine kinase from Xanthemonas campestris
  source 1..963: mol_type = other DNA
atgcatcatcaccatcaccatggggggtccggtatgagtgcactcatttgcggttctttagcgtatgataacatcatgtggtttccggactatttcaagaaccatattctgcccgatcgtgttcaccgcctcaatgtcagctttctggtatttgacatgcgtcgtgaatttggaggctgtgccggcaacattgcgtacaatctgcatctgttgggtggtcgcccgatcgtaatggctacggtgggccaagatttcggtccgtatcgcgaacacttcgaaactctgggcattgacttatcccgcgtcaagatcatcccggatctgagtacaccgcaggggttcattaccaccgacatggatcaaaaccagattacggcgtttcacagcggcgcaatgatgcgttcgtacgaaaatcacgttcgtgatgtgccgggtgttaccttgggcctcgtaggtcctgatggacgcgagggcatgatccaaaatgccgaagaatttgctgctatgggcattccgttcatttttgacccaggtcaggcagtgcctctgttcagcggcccggaactgcgcgaatttatcgaacaggcggactatgtggtggtcaacgattacgaaagccgccttcttcaagcccgtactggctggaacgaggatgacattgttagccgcgtgcaggcgtatatcaccacgcaaggttcggctggagccgtggtaatgacaccggagaagcgctacgttattccggctgctaaaactcgtcgtgtcgttgatccaactggttgcggcgacgcgtttcgcgccggcctgatctatggtattcagcatgaatatgattggttgaccattggccgcatgggaaacttaatgggtgcgctgaaagtggaacaccctggcacccaaaatcagcgtttcacctttgccgaattcaacgaccggttcaaacaatattttggctacgcgctc

SEQ ID NO: 1788 - protein, 321 aa, synthetic construct
  REGION 1..321: note = variant of adenosine kinase from Xanthemonas campestris
MHHHHHHGGSGMSALICGSLAYDNIMWFPDYFKNHILPDRVHRLNVSFLVFDMRREFGGCAGNIAYNLHLLGGRPIVMATVGQDFGPYREHFETLGIDLSRVKIIPDLSTPQGFITTDMDQNQITAFHSGAMMRSYENHVRDVPGVTLGLVGPDGREGMIQNAEEFAAMGIPFIFDPGQAVPLFSGPELREFIEQADYVVVNDYESRLLQARTGWNEDDIVSRVQAYITTQGSAGAVVMTPEKRYVIPAAKTRRVVDPTGCGDAFRAGLIYGIQHEYDWLTIGRMGNLMGALKVEHPGTQNQRFTFAEFNDRFKQYFGYAL

SEQ ID NO: 1789 - DNA, 963 bp, synthetic construct
  misc_feature 1..963: note = variant of adenosine kinase from Xanthemonas campestris
  source 1..963: mol_type = other DNA
atgcatcatcaccatcaccatggggggtccggtatgagtgcactcatttgcggttctttagcgtatgataacatcatggtgtttccggactatttcaagaaccatattctgcccgatcgtgttcaccgcctcaatgtcagctttctggtatttgacatgcgtcgtgaatttggaggctgtgccggcaacattgcgtacaatctgcatctgttgggtggtcgcccgatcgtaatggctacggtgggccaagatttcggtccgtatcgcgaacacttcgaaactctgggcattgacttatcccgcgtcaagatcatcccggatctgagtacaccgcaggggttcattaccaccgacatggatcaaaaccagattacggcgtttcacagcggcgcaatgatgcgttcgtacgaaaatcacgttcgtgatgtgccgggtgttaccttgggcctcgtaggtcctgatggacgcgagggcatgatccaaaatgccgaagaatttgctgctatgggcattccgttcatttttgacccaggtcaggcagtgcctctgttcagcggcccggaactgcgcgaatttatcgaacaggcggactatgtggtggtcaacgattacgaaagccgccttcttcaagcccgtactggctggaacgaggatgacattgttagccgcgtgcaggcgtatatcaccacgcaaggttcggctggagccgtggtaatgacaccggagaagcgctacgttattccggctgctaaaactcgtcgtgtcgttgatccaactggttgcggcgacgcgtttcgcgccggcctgatctatggtattcagcatgaatatgattggttgaccattggccgcatgggaaacttaatgggtgcgctgaaagtggaacaccctggcacccaaaatcagcgtttcgattttgccgaattcaacgaccggttcaaacaatattttggctacgcgctc

SEQ ID NO: 1790 - protein, 321 aa, synthetic construct
  REGION 1..321: note = variant of adenosine kinase from Xanthemonas campestris
MHHHHHHGGSGMSALICGSLAYDNIMVFPDYFKNHILPDRVHRLNVSFLVFDMRREFGGCAGNIAYNLHLLGGRPIVMATVGQDFGPYREHFETLGIDLSRVKIIPDLSTPQGFITTDMDQNQITAFHSGAMMRSYENHVRDVPGVTLGLVGPDGREGMIQNAEEFAAMGIPFIFDPGQAVPLFSGPELREFIEQADYVVVNDYESRLLQARTGWNEDDIVSRVQAYITTQGSAGAVVMTPEKRYVIPAAKTRRVVDPTGCGDAFRAGLIYGIQHEYDWLTIGRMGNLMGALKVEHPGTQNQRFDFAEFNDRFKQYFGYAL

SEQ ID NO: 1791 - DNA, 963 bp, synthetic construct
  misc_feature 1..963: note = variant of adenosine kinase from Xanthemonas campestris
  source 1..963: mol_type = other DNA
atgcatcatcaccatcaccatggggggtccggtatgagtgcactcatttgcggttctttagcgtatgataacatcatgtggtttccggactatttcaagaaccatattctgcccgatcgtgttcaccgcctcaatgtcagctttctggtatttgacatgcgtcgtgaatttggaggctgtgccggcaacattgcgtacaatctgcatctgttgggtggtcgcccgatcgtaatggctacggtgggccaagatttcggtccgtatcgcgaacacttcgaaactctgggcattgacttatcccgcgtcaagatcatcccggatctgagtacaccgcaggggttcattaccaccgacatggatcaaaaccagattacggcgtttcacagcggcgcaatgatgcgttcgtacgaaaatcacgttcgtgatgtgccgggtgttaccttgggcctcgtaggtcctgatggacgcgagggcatgatccaaaatgccgaagaatttgctgctatgggcattccgttcatttttgacccaggtcaggcagtgcctctgttcagcggcccggaactgcgcgaatttatcgaacaggcggactatgtggtggtcaacgattacgaaagccgccttcttcaagcccgtactggctggaacgagcaggacattgttagccgcgtgcaggcgtatatcaccacgcaaggttcggctggagccgtggtaatgacaccggagaagcgctacgttattccggctgctaaaactcgtcgtgtcgttgatccaactggttgcggcgacgcgtttcgcgccggcctgatctatggtattcagcatgaatatgattggttgaccattggccgcatgggaaacttaatgggtgcgctgaaagtggaacaccctggcacccaaaatcagcgtttcacctttgccgaattcaacgaccagttcaaacaatattttggctacgcgctc

SEQ ID NO: 1792 - protein, 321 aa, synthetic construct
  REGION 1..321: note = variant of adenosine kinase from Xanthemonas campestris
MHHHHHHGGSGMSALICGSLAYDNIMWFPDYFKNHILPDRVHRLNVSFLVFDMRREFGGCAGNIAYNLHLLGGRPIVMATVGQDFGPYREHFETLGIDLSRVKIIPDLSTPQGFITTDMDQNQITAFHSGAMMRSYENHVRDVPGVTLGLVGPDGREGMIQNAEEFAAMGIPFIFDPGQAVPLFSGPELREFIEQADYVVVNDYESRLLQARTGWNEQDIVSRVQAYITTQGSAGAVVMTPEKRYVIPAAKTRRVVDPTGCGDAFRAGLIYGIQHEYDWLTIGRMGNLMGALKVEHPGTQNQRFTFAEFNDQFKQYFGYAL

SEQ ID NO: 1793 - DNA, 963 bp, synthetic construct
  misc_feature 1..963: note = variant of adenosine kinase from Xanthemonas campestris
  source 1..963: mol_type = other DNA
atgcatcatcaccatcaccatggggggtccggtatgagtgcactcatttgcggttctttagcgtatgataacatcatgtggtttccggactatttcaagaactatattctgcccgatcgtgttcaccgcctcaatgtcagctttctggtatttgacatgcgtcgtgaatttggaggctgtgccggcaacattgcgtacaatctgcatctgttgggtggtcgcccgatcgtaatggctacggtgggccaagatttcggtccgtatcgcgaacacttcgaaaatctgggcattgacttatcccgcgtcaagatcatcccggatctgagtacaccgcaggggttcattaccaccgacatggatcaaaaccagattacggcgtttcacagcggcgcaatgatgcgttcgtacgaaaatcacgttcgtgatgtgccgggtgttaccttgggcctcgtaggtcctgatggacgcgagggcatgatccaaaatgccgaagaatttgctgctatgggcattccgttcatttttgacccaggtcaggcagtgcctctgttcagcggcccggaactgcgcgaatttatcgaacaggcggactatgtggtggtcaacgattacgaaagccgccttcttcaagcccgtactggctggaacgagcaggacattgttagccgcgtgcaggcgtatatcaccacgcaaggttcggctggagccgtggtaatgacaccggagaagcgctacgttattccggctgctaaaactcgtcgtgtcgttgatccaactggttgcggcgacgcgtttcgcgccggcctgatctatggtattcagcatgaatatgattggttgaccattggccgcatgggaaacttaatgggtgcgctgaaagtggaacaccctggcacccaaaatcagcgtttcagctttgccgaattcaacgaccggttcaaacaatattttggctacgcgctc

SEQ ID NO: 1794 - protein, 321 aa, synthetic construct
  REGION 1..321: note = variant of adenosine kinase from Xanthemonas campestris
MHHHHHHGGSGMSALICGSLAYDNIMWFPDYFKNYILPDRVHRLNVSFLVFDMRREFGGCAGNIAYNLHLLGGRPIVMATVGQDFGPYREHFENLGIDLSRVKIIPDLSTPQGFITTDMDQNQITAFHSGAMMRSYENHVRDVPGVTLGLVGPDGREGMIQNAEEFAAMGIPFIFDPGQAVPLFSGPELREFIEQADYVVVNDYESRLLQARTGWNEQDIVSRVQAYITTQGSAGAVVMTPEKRYVIPAAKTRRVVDPTGCGDAFRAGLIYGIQHEYDWLTIGRMGNLMGALKVEHPGTQNQRFSFAEFNDRFKQYFGYAL

SEQ ID NO: 1795 - DNA, 963 bp, synthetic construct
  misc_feature 1..963: note = variant of adenosine kinase from Xanthemonas campestris
  source 1..963: mol_type = other DNA
atgcatcatcaccatcaccatggggggtccggtatgagtgcactcatttgcggttctttagcgtatgataacatcatggtgtttccggactatttcaagaactatattctgcccgatcgtgttcaccgcctcaatgtcagctttctggtatttgacatgcgtcgtgaatttggaggctgtgccggcaacattgcgtacaatctgcatctgttgggtggtcgcccgatcgtaatggctacggtgggccaagatttcggtccgtatcgcgaacacttcgaaactctgggcattgacttatcccgcgtcaagatcatcgatgatctgagtacaccgcaggggttcattaccaccgacatggatcaaaaccagattacggcgtttcacagcggcgcaatgatgcgttcgtacgaaaatcacgttcgtgatgtgccgggtgttaccttgggcctcgtaggtcctgatggacgcgagggcatgatccaaaatgccgaagaatttgctgctatgggcattccgttcatttttgacccaggtcaggcagtgcctctgttcagcggcccggaactgcgcgaatttatcgaacaggcggactatgtggtggtcaacgattacgaaagccgccttcttcaagcccgtactggctggaacgaggatgacattgttagccgcgtgcaggcgtatatcaccacgcaaggttcggctggagccgtggtaatgacaccggagaagcgctacgttattccggctgctaaaactcgtcgtgtcgttgatccaactggttgcggcgacgcgtttcgcgccggcctgatctatggtattcagcatgaatatgattggttgaccattggccgcatgggaaacttaatgggtgcgctgaaagtggaacaccctggcacccaaaatcagcgtttcgattttgccgaattcaacgaccggttcaaacaatattttggctacgcgctc

SEQ ID NO: 1796 - protein, 321 aa, synthetic construct
  REGION 1..321: note = variant of adenosine kinase from Xanthemonas campestris
MHHHHHHGGSGMSALICGSLAYDNIMVFPDYFKNYILPDRVHRLNVSFLVFDMRREFGGCAGNIAYNLHLLGGRPIVMATVGQDFGPYREHFETLGIDLSRVKIIDDLSTPQGFITTDMDQNQITAFHSGAMMRSYENHVRDVPGVTLGLVGPDGREGMIQNAEEFAAMGIPFIFDPGQAVPLFSGPELREFIEQADYVVVNDYESRLLQARTGWNEDDIVSRVQAYITTQGSAGAVVMTPEKRYVIPAAKTRRVVDPTGCGDAFRAGLIYGIQHEYDWLTIGRMGNLMGALKVEHPGTQNQRFDFAEFNDRFKQYFGYAL

SEQ ID NO: 1797 - DNA, 963 bp, synthetic construct
  misc_feature 1..963: note = variant of adenosine kinase from Xanthemonas campestris
  source 1..963: mol_type = other DNA
atgcatcatcaccatcaccatggggggtccggtatgagtgcactcatttgcggttctttagcgtatgataacatcatggtgtttccggactatttcaagaaccatattctgcccgatcgtgttcaccgcctcaatgtcagctttctggtatttgacatgcgtcgtgaatttggaggctgtgccggcaacattgcgtacaatctgcatctgttgggtggtcgcccgatcgtaatggctacggtgggccaagatttcggtccgtatcgcgaacacttcgaaactctgggcattgacttatcccgcgtcaagatcatcgatgatctgagtacaccgcaggggttcattaccaccgacatggatcaaaaccagattacggcgtttcacagcggcgcaatgatgcgttcgtacgaaaatcacgttcgtgatgtgccgggtgttaccttgggcctcgtaggtcctgatggacgcgagggcatgatccaaaatgccgaagaatttgctgctatgggcattccgttcatttttgacccaggtcaggcagtgcctctgttcagcggcccggaactgcgcgaatttatcgaacaggcggactatgtggtggtcaacgattacgaaagccgccttcttcaagcccgtactggctggaacgaggatgacattgttagccgcgtgcaggcgtatatcaccacgcaaggttcggctggagccgtggtaatgacaccggagaagcgctacgttattccggctgctaaaactcgtcgtgtcgttgatccaactggttgcggcgacgcgtttcgcgccggcctgatctatggtattcagcatgaatatgattggttgaccattggccgcatgggaaacttaatgggtgcgctgaaagtggaacaccctggcacccaaaatcagcgtttcgattttgccgaattcaacgaccggttcaaacaatattttggctacgcgctc

SEQ ID NO: 1798 - protein, 321 aa, synthetic construct
  REGION 1..321: note = variant of adenosine kinase from Xanthemonas campestris
MHHHHHHGGSGMSALICGSLAYDNIMVFPDYFKNHILPDRVHRLNVSFLVFDMRREFGGCAGNIAYNLHLLGGRPIVMATVGQDFGPYREHFETLGIDLSRVKIIDDLSTPQGFITTDMDQNQITAFHSGAMMRSYENHVRDVPGVTLGLVGPDGREGMIQNAEEFAAMGIPFIFDPGQAVPLFSGPELREFIEQADYVVVNDYESRLLQARTGWNEDDIVSRVQAYITTQGSAGAVVMTPEKRYVIPAAKTRRVVDPTGCGDAFRAGLIYGIQHEYDWLTIGRMGNLMGALKVEHPGTQNQRFDFAEFNDRFKQYFGYAL

SEQ ID NO: 1799 - DNA, 963 bp, synthetic construct
  misc_feature 1..963: note = variant of adenosine kinase from Xanthemonas campestris
  source 1..963: mol_type = other DNA
atgcatcatcaccatcaccatggggggtccggtatgagtgcactcatttgcggttctttagcgtatgataacatcatgtggtttccggactatttcaagaaccatattctgcccgatcgtgttcaccgcctcaatgtcagctttctggtatttgacatgcgtcgtgaatttggaggctgtgccggcaacattgcgtacaatctgcatctgttgggtggtcgcccgatcgtaatggctacggtgggccaagatttcggtccgtatcgcgaacacttcgaaactctgggcattgacttatcccgcgtcaagatcatcccggatctgagtacaccgcaggggttcattaccaccgacatggatcaaaaccagattacggcgtttcacagcggcgcaatgatgcgttcgtacgaaaatcacgttcgtgatgtgccgggtgttaccttgggcctcgtaggtcctgatggacgcgagggcatgatccaaaatgccgaagaatttgctgctatgggcattccgttcatttttgacccaggtcaggcagtgcctctgttcagcggcccggaactgcgcgaatttatcgaacaggcggactatgtggtggtcaacgattacgaaagccgccttcttcaagcccgtactggctggaacgaggatgacattgttagccgcgtgcaggcgtatatcaccacgcaaggttcggctggagccgtggtaatgacaccggagaagcgctacgttattccggctgctaaaactcgtcgtgtcgttgatccaactggttgcggcgacgcgtttcgcgccggcctgatctatggtattcagcatgaatatgattggttgaccattggccgcatgggaaacttaatgggtgcgctgaaagtggaacaccctggcacccaaaatcagcgtttcgattttgccgaattcaacgaccagttcaaacaatattttggctacgcgctc

SEQ ID NO: 1800 - protein, 321 aa, synthetic construct
  REGION 1..321: note = variant of adenosine kinase from Xanthemonas campestris
MHHHHHHGGSGMSALICGSLAYDNIMWFPDYFKNHILPDRVHRLNVSFLVFDMRREFGGCAGNIAYNLHLLGGRPIVMATVGQDFGPYREHFETLGIDLSRVKIIPDLSTPQGFITTDMDQNQITAFHSGAMMRSYENHVRDVPGVTLGLVGPDGREGMIQNAEEFAAMGIPFIFDPGQAVPLFSGPELREFIEQADYVVVNDYESRLLQARTGWNEDDIVSRVQAYITTQGSAGAVVMTPEKRYVIPAAKTRRVVDPTGCGDAFRAGLIYGIQHEYDWLTIGRMGNLMGALKVEHPGTQNQRFDFAEFNDQFKQYFGYAL

SEQ ID NO: 1801 - DNA, 963 bp, synthetic construct
  misc_feature 1..963: note = variant of adenosine kinase from Xanthemonas campestris
  source 1..963: mol_type = other DNA
atgcatcatcaccatcaccatggggggtccggtatgagtgcactcatttgcggttctttagcgtatgataacatcatggtgtttccggactatttcaagaactatattctgcccgatcgtgttcaccgcctcaatgtcagctttctggtatttgacatgcgtcgtgaatttggaggctgtgccggcaacattgcgtacaatctgcatctgttgggtggtcgcccgatcgtaatggctacggtgggccaagatttcggtccgtatcgcgaacacttcgaaactctgggcattgacttatcccgcgtcaagatcatcccggatctgagtacaccgcaggggttcattaccaccgacatggatcaaaaccagattacggcgtttcacagcggcgcaatgatgcgttcgtacgaaaatcacgttcgtgatgtgccgggtgttaccttgggcctcgtaggtcctgatggacgcgagggcatgatccaaaatgccgaagaatttgctgctatgggcattccgttcatttttgacccaggtcaggcagtgcctctgttcagcggcccggaactgcgcgaatttatcgaacaggcggactatgtggtggtcaacgattacgaaagccgccttcttcaagcccgtactggctggaacgagcaggacattgttagccgcgtgcaggcgtatatcaccacgcaaggttcggctggagccgtggtaatgacaccggagaagcgctacgttattccggctgctaaaactcgtcgtgtcgttgatccaactggttgcggcgacgcgtttcgcgccggcctgatctatggtattcagcatgaatatgattggttgaccattggccgcatgggaaacttaatgggtgcgctgaaagtggaacaccctggcacccaaaatcagcgtttcgattttgccgaattcaacgaccggttcaaacaatattttggctacgcgctc

SEQ ID NO: 1802 - protein, 321 aa, synthetic construct
  REGION 1..321: note = variant of adenosine kinase from Xanthemonas campestris
MHHHHHHGGSGMSALICGSLAYDNIMVFPDYFKNYILPDRVHRLNVSFLVFDMRREFGGCAGNIAYNLHLLGGRPIVMATVGQDFGPYREHFETLGIDLSRVKIIPDLSTPQGFITTDMDQNQITAFHSGAMMRSYENHVRDVPGVTLGLVGPDGREGMIQNAEEFAAMGIPFIFDPGQAVPLFSGPELREFIEQADYVVVNDYESRLLQARTGWNEQDIVSRVQAYITTQGSAGAVVMTPEKRYVIPAAKTRRVVDPTGCGDAFRAGLIYGIQHEYDWLTIGRMGNLMGALKVEHPGTQNQRFDFAEFNDRFKQYFGYAL

SEQ ID NO: 1803 - DNA, 963 bp, synthetic construct
  misc_feature 1..963: note = variant of adenosine kinase from Xanthemonas campestris
  source 1..963: mol_type = other DNA
atgcatcatcaccatcaccatggggggtccggtatgagtgcactcatttgcggttctttagcgtatgataacatcatgtggtttccggactatttcaagaaccatattctgcccgatcgtgttcaccgcctcaatgtcagctttctggtatttgacatgcgtcgtgaatttggaggctgtgccggcaacattgcgtacaatctgcatctgttgggtggtcgcccgatcgtaatggctacggtgggccaagatttcggtccgtatcgcgaacacttcgaaactctgggcattgacttatcccgcgtcaagatcatcccggatctgagtacaccgcaggggttcattaccaccgacatggatcaaaaccagattacggcgtttcacagcggcgcaatgatgcgttcgtacgaaaatcacgttcgtgatgtgccgggtgttaccttgggcctcgtaggtcctgatggacgcgagggcatgatccaaaatgccgaagaatttgctgctatgggcattccgttcatttttgacccaggtcaggcagtgcctctgttcagcggcccggaactgcgcgaatttatcgaacaggcggactatgtggtggtcaacgattacgaaagccgccttcttcaagcccgtactggctggaacgagcaggacattgttagccgcgtgcaggcgtatatcaccacgcaaggttcggctggagccgtggtaatgacaccggagaagcgctacgttattccggctgctaaaactcgtcgtgtcgttgatccaactggttgcggcgacgcgtttcgcgccggcctgatctatggtattcagcatgaatatgattggttgaccattggccgcatgggaaacttaatgggtgcgctgaaagtggaacaccctggcacccaaaatcagcgtttcgattttgccgaattcaacgaccagttcaaacaatattttggctacgcgctc

SEQ ID NO: 1804 - protein, 321 aa, synthetic construct
  REGION 1..321: note = variant of adenosine kinase from Xanthemonas campestris
MHHHHHHGGSGMSALICGSLAYDNIMWFPDYFKNHILPDRVHRLNVSFLVFDMRREFGGCAGNIAYNLHLLGGRPIVMATVGQDFGPYREHFETLGIDLSRVKIIPDLSTPQGFITTDMDQNQITAFHSGAMMRSYENHVRDVPGVTLGLVGPDGREGMIQNAEEFAAMGIPFIFDPGQAVPLFSGPELREFIEQADYVVVNDYESRLLQARTGWNEQDIVSRVQAYITTQGSAGAVVMTPEKRYVIPAAKTRRVVDPTGCGDAFRAGLIYGIQHEYDWLTIGRMGNLMGALKVEHPGTQNQRFDFAEFNDQFKQYFGYAL

SEQ ID NO: 1805 - DNA, 963 bp, synthetic construct
  misc_feature 1..963: note = variant of adenosine kinase from Xanthemonas campestris
  source 1..963: mol_type = other DNA
atgcatcatcaccatcaccatggggggtccggtatgagtgcactcatttgcggttctttagcgtatgataacatcatgtggtttccggactatttcaagaaccatattctgcccgatcgtgttcaccgcctcaatgtcagctttctggtatttgacatgcgtcgtgaatttggaggctgtgccggcaacattgcgtacaatctgcatctgttgggtggtcgcccgatcgtaatggctacggtgggccaagatttcggtccgtatcgcgaacacttcgaaactctgggcattgacttatcccgcgtcaagatcatcccggatctgagtacaccgcaggggttcattaccaccgacatggatcaaaaccagattacggcgtttcacagcggcgcaatgatgcgttcgtacgaaaatcacgttcgtgatgtgccgggtgttaccttgggcctcgtaggtcctgatggacgcgagggcatgatccaaaatgccgaagaatttgctgctatgggcattccgttcatttttgacccaggtcaggcagtgcctctgttcagcggcccggaactgcgcgaatttatcgaacaggcggactatgtggtggtcaacgattacgaaagccgccttcttcaagcccgtactggctggaacgagcaggacattgttagccgcgtgcaggcgtatatcaccacgcaaggttcggctggagccgtggtaatgacaccggagaagcgctacgttattccggctgctaaaactcgtcgtgtcgttgatccaactggttgcggcgacgcgtttcgcgccggcctgatctatggtattcagcatgaatatgattggttgaccattggccgcatgggaaacttaatgggtgcgctgaaagtggaacaccctggcacccaaaatcagcgtttcagctttgccgaattcaacgaccagttcaaacaatattttggctacgcgctc

SEQ ID NO: 1806 - protein, 321 aa, synthetic construct
  REGION 1..321: note = variant of adenosine kinase from Xanthemonas campestris
MHHHHHHGGSGMSALICGSLAYDNIMWFPDYFKNHILPDRVHRLNVSFLVFDMRREFGGCAGNIAYNLHLLGGRPIVMATVGQDFGPYREHFETLGIDLSRVKIIPDLSTPQGFITTDMDQNQITAFHSGAMMRSYENHVRDVPGVTLGLVGPDGREGMIQNAEEFAAMGIPFIFDPGQAVPLFSGPELREFIEQADYVVVNDYESRLLQARTGWNEQDIVSRVQAYITTQGSAGAVVMTPEKRYVIPAAKTRRVVDPTGCGDAFRAGLIYGIQHEYDWLTIGRMGNLMGALKVEHPGTQNQRFSFAEFNDQFKQYFGYAL

SEQ ID NO: 1807 - DNA, 963 bp, synthetic construct
  misc_feature 1..963: note = variant of adenosine kinase from Xanthemonas campestris
  source 1..963: mol_type = other DNA
atgcatcatcaccatcaccatggggggtccggtatgagtgcactcatttgcggttctttagcgtatgataacatcatgtggtttccggactatttcaagaactatattctgcccgatcgtgttcaccgcctcaatgtcagctttctggtatttgacatgcgtcgtgaatttggaggctgtgccggcaacattgcgtacaatctgcatctgttgggtggtcgcccgatcgtaatggctacggtgggccaagatttcggtccgtatcgcgaacacttcgaaactctgggcattgacttatcccgcgtcaagatcatcgatgatctgagtacaccgcaggggttcattaccaccgacatggatcaaaaccagattacggcgtttcacagcggcgcaatgatgcgttcgtacgaaaatcacgttcgtgatgtgccgggtgttaccttgggcctcgtaggtcctgatggacgcgagggcatgatccaaaatgccgaagaatttgctgctatgggcattccgttcatttttgacccaggtcaggcagtgcctctgttcagcggcccggaactgcgcgaatttatcgaacaggcggactatgtggtggtcaacgattacgaaagccgccttcttcaagcccgtactggctggaacgaggatgacattgttagccgcgtgcaggcgtatatcaccacgcaaggttcggctggagccgtggtaatgacaccggagaagcgctacgttattccggctgctaaaactcgtcgtgtcgttgatccaactggttgcggcgacgcgtttcgcgccggcctgatctatggtattcagcatgaatatgattggttgaccattggccgcatgggaaacttaatgggtgcgctgaaagtggaacaccctggcacccaaaatcagcgtttcgattttgccgaattcaacgaccggttcaaacaatattttggctacgcgctc

SEQ ID NO: 1808 - protein, 321 aa, synthetic construct
  REGION 1..321: note = variant of adenosine kinase from Xanthemonas campestris
MHHHHHHGGSGMSALICGSLAYDNIMWFPDYFKNYILPDRVHRLNVSFLVFDMRREFGGCAGNIAYNLHLLGGRPIVMATVGQDFGPYREHFETLGIDLSRVKIIDDLSTPQGFITTDMDQNQITAFHSGAMMRSYENHVRDVPGVTLGLVGPDGREGMIQNAEEFAAMGIPFIFDPGQAVPLFSGPELREFIEQADYVVVNDYESRLLQARTGWNEDDIVSRVQAYITTQGSAGAVVMTPEKRYVIPAAKTRRVVDPTGCGDAFRAGLIYGIQHEYDWLTIGRMGNLMGALKVEHPGTQNQRFDFAEFNDRFKQYFGYAL

SEQ ID NO: 1809 - DNA, 19 bp, synthetic construct
  misc_feature 1..19: note = Modified oligo substrate or product
  modified_base 16: mod_base = OTHER; note = 2'-methoxyguanosine
  modified_base 17: mod_base = OTHER; note = 2'-methoxyadenosine
  modified_base 18: mod_base = OTHER; note = 2'-methoxycytidine
  modified_base 19: mod_base = OTHER; note = 2'-fluoro guanosine
  source 1..19: mol_type = other DNA
tttttttttttttttnnnn

SEQ ID NO: 1810 - DNA, 19 bp, synthetic construct
  misc_feature 1..19: note = Modified oligo substrate or product
  modified_base 1: mod_base = OTHER; note = 2'-deoxythymidine with 6-carboxyfluorescein modification
  modified_base 16: mod_base = OTHER; note = 2'-methoxyguanosine
  modified_base 17: mod_base = OTHER; note = 2'-methoxyadenosine
  modified_base 18: mod_base = OTHER; note = 2'-methoxycytidine
  modified_base 19: mod_base = OTHER; note = 2'-fluoro guanosine
  source 1..19: mol_type = other DNA
nttttttttttttttnnnn

SEQ ID NO: 1811 - DNA, 19 bp, synthetic construct
  misc_feature 1..19: note = Modified oligo substrate or product
  modified_base 16: mod_base = OTHER; note = 2'-methoxyguanosine
  modified_base 17: mod_base = OTHER; note = 2'-methoxyadenosine
  modified_base 18: mod_base = OTHER; note = 2'-methoxycytidine
  modified_base 19: mod_base = OTHER; note = 2'-methoxycytidine
  source 1..19: mol_type = other DNA
tttttttttttttttnnnn

SEQ ID NO: 1812 - DNA, 19 bp, synthetic construct
  misc_feature 1..19: note = Modified oligo substrate or product
  modified_base 1: mod_base = OTHER; note = 2'-deoxythymidine with 6-carboxyfluorescein modification
  modified_base 16: mod_base = OTHER; note = 2'-methoxyguanosine
  modified_base 17: mod_base = OTHER; note = 2'-methoxyadenosine
  modified_base 18: mod_base = OTHER; note = 2'-methoxycytidine
  modified_base 19: mod_base = OTHER; note = 2'-methoxycytidine
  source 1..19: mol_type = other DNA
nttttttttttttttnnnn

SEQ ID NO: 1813 - DNA, 19 bp, synthetic construct
  misc_feature 1..19: note = Modified oligo substrate or product
  modified_base 16: mod_base = OTHER; note = 2'-methoxyguanosine
  modified_base 17: mod_base = OTHER; note = 2'-methoxyadenosine
  modified_base 18: mod_base = OTHER; note = 2'-methoxycytidine
  modified_base 19: mod_base = OTHER; note = 2'-methoxyuridine
  source 1..19: mol_type = other DNA
tttttttttttttttnnnn

SEQ ID NO: 1814 - DNA, 19 bp, synthetic construct
  misc_feature 1..19: note = Modified oligo substrate or product
  modified_base 1: mod_base = OTHER; note = 2'-deoxythymidine with 6-carboxyfluorescein modification
  modified_base 16: mod_base = OTHER; note = 2'-methoxyguanosine
  modified_base 17: mod_base = OTHER; note = 2'-methoxyadenosine
  modified_base 18: mod_base = OTHER; note = 2'-methoxycytidine
  modified_base 19: mod_base = OTHER; note = 2'-methoxyuridine
  source 1..19: mol_type = other DNA
nttttttttttttttnnnn

SEQ ID NO: 1815 - DNA, 19 bp, synthetic construct
  misc_feature 1..19: note = Modified oligo substrate or product
  modified_base 16: mod_base = OTHER; note = 2'-methoxyguanosine
  modified_base 17: mod_base = OTHER; note = 2'-methoxyadenosine
  modified_base 18: mod_base = OTHER; note = 2'-methoxycytidine
  modified_base 19: mod_base = OTHER; note = 2'-methoxyguanosine
  source 1..19: mol_type = other DNA
tttttttttttttttnnnn

SEQ ID NO: 1816 - DNA, 19 bp, synthetic construct
  misc_feature 1..19: note = Modified oligo substrate or product
  modified_base 1: mod_base = OTHER; note = 2'-deoxythymidine with 6-carboxyfluorescein modification
  modified_base 16: mod_base = OTHER; note = 2'-methoxyguanosine
  modified_base 17: mod_base = OTHER; note = 2'-methoxyadenosine
  modified_base 18: mod_base = OTHER; note = 2'-methoxycytidine
  modified_base 19: mod_base = OTHER; note = 2'-methoxyguanosine
  source 1..19: mol_type = other DNA
nttttttttttttttnnnn

SEQ ID NO: 1817 - DNA, 963 bp, synthetic construct
  misc_feature 1..963: note = variant of adenosine kinase from Xanthemonas campestris
  source 1..963: mol_type = other DNA
atgcatcatcaccatcaccatggggggtccggtatgagtgcactcatttgcggttctttagcgtatgataacatcatgtggtttccggactatttcaagaaccatattctgcccgatcgtgttcaccgcctcaatgtcagctttctggtatttgacatgcgtcgtgaatttggaggctgtgccggcaacattgcgtacaatctgcatctgttgggtggtcgcccgatcgtaatggctacggtgggccaagatttcggtccgtatcgcgaacacttcgaaactctgggcattgacttatcccgcgtcaagatcatcgatgatctgagtacaccgcaggggttcattaccaccgacatggatcaaaaccagattacggcgtttcacagcggcgcaatgatgcgttcgtacgaaaatcacgttcgtgatgtgccgggtgttaccttgggcctcgtaggtcctgatggacgcgagggcatgatccaaaatgccgaagaatttgctgctatgggcattccgttcatttttgacccaggtcaggcagtgcctctgttcagcggcccggaactgcgcgaatttatcgaacaggcggactatgtggtggtcaacgattacgaaagccgccttcttcaagcccgtactggctggaacgagcaggacattgttagccgcgtgcaggcgtatatcaccacgcaaggttcggctggagccgtggtaatgacaccggagaagcgctacgttattccggctgctaaaactgagcgtgtcgttgatccaactggttgcggcgacgcgtttcgcgccggcctgatctatggtattcagcatgaatatgattggttgaccattggccgcatgggaaacttaatgggtgcgctgaaagtggaacaccctggcacccaaaatcagcgtttcacctttgccgaattcaacgaccggttcaaacaatattttggctacgcgctc

SEQ ID NO: 1818 - protein, 321 aa, synthetic construct
  REGION 1..321: note = variant of adenosine kinase from Xanthemonas campestris
MHHHHHHGGSGMSALICGSLAYDNIMWFPDYFKNHILPDRVHRLNVSFLVFDMRREFGGCAGNIAYNLHLLGGRPIVMATVGQDFGPYREHFETLGIDLSRVKIIDDLSTPQGFITTDMDQNQITAFHSGAMMRSYENHVRDVPGVTLGLVGPDGREGMIQNAEEFAAMGIPFIFDPGQAVPLFSGPELREFIEQADYVVVNDYESRLLQARTGWNEQDIVSRVQAYITTQGSAGAVVMTPEKRYVIPAAKTERVVDPTGCGDAFRAGLIYGIQHEYDWLTIGRMGNLMGALKVEHPGTQNQRFTFAEFNDRFKQYFGYAL

SEQ ID NO: 1819 - DNA, 963 bp, synthetic construct
  misc_feature 1..963: note = variant of adenosine kinase from Xanthemonas campestris
  source 1..963: mol_type = other DNA
atgcatcatcaccatcaccatggggggtccggtatgagtgcactcatttgcggttctttagcgtatgataacatcatgtggtttccggactatttcaagaaccatattctgcccgatcgtgttcaccgcctcaatgtcagctttctggtatttgacatgcgtcgtgaatttggaggctgtgccggcaacattgcgtacaatctgcatctgttgggtggtcgcccgatcgtaatggctacggtgggccaagatttcggtccgtatcgcgaacacttcgaaactctgggcattgacttatcccgcgtcaagatcatcgatgatctgagtacaccgcaggggttcattaccaccgacatggatcaaaaccagattacggcgtttcacagcggcgcaatgatgcgttcgtacgaaaatcacgttcgtgatgtgccgggtgttaccttgggcctcgtaggtcctgatggacgcgagggcatgatccaaaatgccgaagaatttgctgctatgggcattccgttcatttttgacccaggtcaggcagtgcctctgttcagcggcccggaactgcgcgaatttatcgaacaggcggactatgtggtggtcaacgattacgaaagccgccttcttcaagcccgtactggctggaacgagcaggacattgttagccgcgtgcaggcgtatatcaccacgcaaggttcggctggagccgtggtaatgacaccggagaagcgctacgttattccggctgctaaaactgggcgtgtcgttgatccaactggttgcggcgacgcgtttcgcgccggcctgatctatggtattcagcatgaatatgattggttgaccattggccgcatgggaaacttaatgggtgcgctgaaagtggaacaccctggcacccaaaatcagcgtttcacctttgccgaattcaacgaccggttcaaacaatattttggctacgcgctc

SEQ ID NO: 1820 - protein, 321 aa, synthetic construct
  REGION 1..321: note = variant of adenosine kinase from Xanthemonas campestris
MHHHHHHGGSGMSALICGSLAYDNIMWFPDYFKNHILPDRVHRLNVSFLVFDMRREFGGCAGNIAYNLHLLGGRPIVMATVGQDFGPYREHFETLGIDLSRVKIIDDLSTPQGFITTDMDQNQITAFHSGAMMRSYENHVRDVPGVTLGLVGPDGREGMIQNAEEFAAMGIPFIFDPGQAVPLFSGPELREFIEQADYVVVNDYESRLLQARTGWNEQDIVSRVQAYITTQGSAGAVVMTPEKRYVIPAAKTGRVVDPTGCGDAFRAGLIYGIQHEYDWLTIGRMGNLMGALKVEHPGTQNQRFTFAEFNDRFKQYFGYAL

SEQ ID NO: 1821 - DNA, 963 bp, synthetic construct
  misc_feature 1..963: note = variant of adenosine kinase from Xanthemonas campestris
  source 1..963: mol_type = other DNA
atgcatcatcaccatcaccatggggggtccggtatgagtgcactcatttgcggttctttagcgtatgataacatcatgtggtttccggactatttcaagaaccatattctgcccgatcgtgttcaccgcctcaatgtcagctttctggtatttgacatgcgtcgtgaatttggaggctgtgccggcaacattgcgtacaatctgcatctgttgggtggtcgcccgatcgtaatggctacggtgggccaagatttcggtccgtatcgcgaacacttcgaaactctgggcattgacttatcccgcgtcaagatcatcgatgatctgagtacaccgcaggggttcattaccaccgacatggatcaaaaccagattacggcgtttcacagcggcgcaatgatgcgttcgtacgaaaatcacgttcgtgatgtgccgggtgttaccttgggcctcgtaggtcctgatggacgcgagggcatgatccaaaatgccgaagaatttgctgctatgggcattccgttcatttttgacccaggtcaggcagtgcctctgttcagcggcccggaactgcgcgaatttatcgaacaggcggactatgtggtggtcaacgattacgaaagccgccttcttcaagcccgtactggctggaacgagcaggacattgttagccgcgtgcaggcgtatatcaccacgcaaggttcggctggagccgtggtaatgacaccggagaagcgctacgttattccggctgctaaaactttgcgtgtcgttgatccaactggttgcggcgacgcgtttcgcgccggcctgatctatggtattcagcatgaatatgattggttgaccattggccgcatgggaaacttaatgggtgcgctgaaagtggaacaccctggcacccaaaatcagcgtttcacctttgccgaattcaacgaccggttcaaacaatattttggctacgcgctc

SEQ ID NO: 1822 - protein, 321 aa, synthetic construct
  REGION 1..321: note = variant of adenosine kinase from Xanthemonas campestris
MHHHHHHGGSGMSALICGSLAYDNIMWFPDYFKNHILPDRVHRLNVSFLVFDMRREFGGCAGNIAYNLHLLGGRPIVMATVGQDFGPYREHFETLGIDLSRVKIIDDLSTPQGFITTDMDQNQITAFHSGAMMRSYENHVRDVPGVTLGLVGPDGREGMIQNAEEFAAMGIPFIFDPGQAVPLFSGPELREFIEQADYVVVNDYESRLLQARTGWNEQDIVSRVQAYITTQGSAGAVVMTPEKRYVIPAAKTLRVVDPTGCGDAFRAGLIYGIQHEYDWLTIGRMGNLMGALKVEHPGTQNQRFTFAEFNDRFKQYFGYAL

SEQ ID NO: 1823 - DNA, 963 bp, synthetic construct
  misc_feature 1..963: note = variant of adenosine kinase from Xanthemonas campestris
  source 1..963: mol_type = other DNA
atgcatcatcaccatcaccatggggggtccggtatgagtgcactcatttgcggttctttagcgtatgataacatcatgtggtttccggactatttcaagaaccatattctgcccgatcgtgttcaccgcctcaatgtcagctttctggtatttgacatgcgtcgtgaatttggaggctgtgccggcaacattgcgtacaatctgcatctgttgggtggtcgcccgatcgtaatggctacggtgggccaagatttcggtccgtatcgcgaacacttcgaaactctgggcattgacttatcccgcgtcaagatcatcgatgatctgagtacaccgcaggggttcattaccaccgacatggatcaaaaccagattacggcgtttcacagcggcgcaatgatgcgttcgtacgaaaatcacgttcgtgatgtgccgggtgttaccttgggcctcgtaggtcctgatggacgcgagggcatgatccaaaatgccgaagaatttgctgctatgggcattccgttcatttttgacccaggtcaggcagtgcctctgttcagcggcccggaactgcgcgaatttatcgaacaggcggactatgtggtggtcaacgattacgaaagccgccttcttcaagcccgtactggctggaacgagcaggacattgttagccgcgtgcaggcgtatatcaccacgcaaggttcggctggagccgtggtaatgacaccggagaagcgctacgttattccggctgctaaaactgatcgtgtcgttgatccaactggttgcggcgacgcgtttcgcgccggcctgatctatggtattcagcatgaatatgattggttgaccattggccgcatgggaaacttaatgggtgcgctgaaagtggaacaccctggcacccaaaatcagcgtttcacctttgccgaattcaacgaccggttcaaacaatattttggctacgcgctc

SEQ ID NO: 1824 - protein, 321 aa, synthetic construct
  REGION 1..321: note = variant of adenosine kinase from Xanthemonas campestris
MHHHHHHGGSGMSALICGSLAYDNIMWFPDYFKNHILPDRVHRLNVSFLVFDMRREFGGCAGNIAYNLHLLGGRPIVMATVGQDFGPYREHFETLGIDLSRVKIIDDLSTPQGFITTDMDQNQITAFHSGAMMRSYENHVRDVPGVTLGLVGPDGREGMIQNAEEFAAMGIPFIFDPGQAVPLFSGPELREFIEQADYVVVNDYESRLLQARTGWNEQDIVSRVQAYITTQGSAGAVVMTPEKRYVIPAAKTDRVVDPTGCGDAFRAGLIYGIQHEYDWLTIGRMGNLMGALKVEHPGTQNQRFTFAEFNDRFKQYFGYAL

SEQ ID NO: 1825 - DNA, 963 bp, synthetic construct
  misc_feature 1..963: note = variant of adenosine kinase from Xanthemonas campestris
  source 1..963: mol_type = other DNA
atgcatcatcaccatcaccatggggggtccggtatgagtgcactcatttgcggttctttagcgtatgataacatcatgtggtttccggactatttcaagaaccatattctgcccgatcgtgttcaccgcctcaatgtcagctttctggtatttgacatgcgtcgtgaatttggaggctgtgccggcaacattgcgtacaatctgcatctgttgggtggtcgcccgatcgtaatggctacggtgggccaagatttcggtccgtatcgcgaacacttcgaaactctgggcattgacttatcccgcgtcaagatcatcgatgatctgagtacaccgcaggggttcattaccaccgacatggatcaaaaccagattacggcgtttcacagcggcgcaatgatgcgttcgtacgaaaatcacgttcgtgatgtgccgggtgttaccttgggcctcgtaggtcctgatggacgcgagggcatgatccaaaatgccgaagaatttgctgctatgggcattccgttcatttttgacccaggtcaggcagtgcctctgttcagcggcccggaactgcgcgaatttatcgaacaggcggactatgtggtggtcaacgattacgaaagccgccttcttcaagcccgtactggctggaacgagcaggacattgttagccgcgtgcaggcgtatatcaccacgcaaggttcggctggagccgtggtaatgacaccggagaagcgctacgttattccggctgctaaaacttctcgtgtcgttgatccaactggttgcggcgacgcgtttcgcgccggcctgatctatggtattcagcatgaatatgattggttgaccattggccgcatgggaaacttaatgggtgcgctgaaagtggaacaccctggcacccaaaatcagcgtttcacctttgccgaattcaacgaccggttcaaacaatattttggctacgcgctc

SEQ ID NO: 1826 - protein, 321 aa, synthetic construct
  REGION 1..321: note = variant of adenosine kinase from Xanthemonas campestris
MHHHHHHGGSGMSALICGSLAYDNIMWFPDYFKNHILPDRVHRLNVSFLVFDMRREFGGCAGNIAYNLHLLGGRPIVMATVGQDFGPYREHFETLGIDLSRVKIIDDLSTPQGFITTDMDQNQITAFHSGAMMRSYENHVRDVPGVTLGLVGPDGREGMIQNAEEFAAMGIPFIFDPGQAVPLFSGPELREFIEQADYVVVNDYESRLLQARTGWNEQDIVSRVQAYITTQGSAGAVVMTPEKRYVIPAAKTSRVVDPTGCGDAFRAGLIYGIQHEYDWLTIGRMGNLMGALKVEHPGTQNQRFTFAEFNDRFKQYFGYAL

SEQ ID NO: 1827 - DNA, 963 bp, synthetic construct
  misc_feature 1..963: note = variant of adenosine kinase from Xanthemonas campestris
  source 1..963: mol_type = other DNA
atgcatcatcaccatcaccatggggggtccggtatgagtgcactcatttgcggttctttagcgtatgataacatcatgtggtttccggactatttcaagaaccatattctgcccgatcgtgttcaccgcctcaatgtcagctttctggtatttgacatgcgtcgtgaatttggaggctgtgccggcaacattgcgtacaatctgcatctgttgggtggtcgcccgatcgtaatggctacggtgggccaagatttcggtccgtatcgcgaacacttcgaaactctgggcattgacttatcccgcgtcaagatcatcgatgatctgagtacaccgcaggggttcattaccaccgacatggatcaaaaccagattacggcgtttcacagcggcgcaatgatgcgttcgtacgaaaatcacgttcgtgatgtgccgggtgttaccttgggcctcgtaggtcctgatggacgcgagggcatgatccaaaatgccgaagaatttgctgctatgggcattccgttcatttttgacccaggtcaggcagtgcctctgttcagcggcccggaactgcgcgaatttatcgaacaggcggactatgtggtggtcaacgattacgaaagccgccttcttcaagcccgtactggctggaacgagcaggacattgttagccgcgtgcaggcgtatatcaccacgcaaggttcggctggagccgtggtaatgacaccggagaagcgctacgttattccggctgctaaaactaagcgtgtcgttgatccaactggttgcggcgacgcgtttcgcgccggcctgatctatggtattcagcatgaatatgattggttgaccattggccgcatgggaaacttaatgggtgcgctgaaagtggaacaccctggcacccaaaatcagcgtttcacctttgccgaattcaacgaccggttcaaacaatattttggctacgcgctc

SEQ ID NO: 1828 - protein, 321 aa, synthetic construct
  REGION 1..321: note = variant of adenosine kinase from Xanthemonas campestris
MHHHHHHGGSGMSALICGSLAYDNIMWFPDYFKNHILPDRVHRLNVSFLVFDMRREFGGCAGNIAYNLHLLGGRPIVMATVGQDFGPYREHFETLGIDLSRVKIIDDLSTPQGFITTDMDQNQITAFHSGAMMRSYENHVRDVPGVTLGLVGPDGREGMIQNAEEFAAMGIPFIFDPGQAVPLFSGPELREFIEQADYVVVNDYESRLLQARTGWNEQDIVSRVQAYITTQGSAGAVVMTPEKRYVIPAAKTKRVVDPTGCGDAFRAGLIYGIQHEYDWLTIGRMGNLMGALKVEHPGTQNQRFTFAEFNDRFKQYFGYAL

SEQ ID NO: 1829 - DNA, 963 bp, synthetic construct
  misc_feature 1..963: note = variant of adenosine kinase from Xanthemonas campestris
  source 1..963: mol_type = other DNA
atgcatcatcaccatcaccatggggggtccggtatgagtgcactcatttgcggttctttagcgtatgataacatcatgtggtttccggactatttcaagaaccatattctgcccgatcgtgttcaccgcctcaatgtcagctttctggtatttgacatgcgtcgtgaatttggaggctgtgccggcaacattgcgtacaatctgcatctgttgggtggtcgcccgatcgtaatggctacggtgggccaagatttcggtccgtatcgcgaacacttcgaaactctgggcattgacttatcccgcgtcaagatcatcgatgatctgagtacaccgcaggggttcattaccaccgacatggatcaaaaccagattacggcgtttcacagcggcgcaatgatgcgttcgtacgaaaatcacgttcgtgatgtgccgggtgttaccttgggcctcgtaggtcctgatggacgcgagggcatgatccaaaatgccgaagaatttgctgctatgggcattccgttcatttttgacccaggtcaggcagtgcctctgttcagcggcccggaactgcgcgaatttatcgaacaggcggactatgtggtggtcaacgattacgaaagccgccttcttcaagcccgtactggctggaacgagcaggacattgttagccgcgtgcaggcgtatatcaccacgcaaggttcggctggatgtgtggtaatgacaccggagaagcgctacgttattccggctgctaaaactcgtcgtgtcgttgatccaactggttgcggcgacgcgtttcgcgccggcctgatctatggtattcagcatgaatatgattggttgaccattggccgcatgggaaacttaatgggtgcgctgaaagtggaacaccctggcacccaaaatcagcgtttcacctttgccgaattcaacgaccggttcaaacaatattttggctacgcgctc

SEQ ID NO: 1830 - protein, 321 aa, synthetic construct
  REGION 1..321: note = variant of adenosine kinase from Xanthemonas campestris
MHHHHHHGGSGMSALICGSLAYDNIMWFPDYFKNHILPDRVHRLNVSFLVFDMRREFGGCAGNIAYNLHLLGGRPIVMATVGQDFGPYREHFETLGIDLSRVKIIDDLSTPQGFITTDMDQNQITAFHSGAMMRSYENHVRDVPGVTLGLVGPDGREGMIQNAEEFAAMGIPFIFDPGQAVPLFSGPELREFIEQADYVVVNDYESRLLQARTGWNEQDIVSRVQAYITTQGSAGCVVMTPEKRYVIPAAKTRRVVDPTGCGDAFRAGLIYGIQHEYDWLTIGRMGNLMGALKVEHPGTQNQRFTFAEFNDRFKQYFGYAL

SEQ ID NO: 1831 - DNA, 963 bp, synthetic construct
  misc_feature 1..963: note = variant of adenosine kinase from Xanthemonas campestris
  source 1..963: mol_type = other DNA
atgcatcatcaccatcaccatggggggtccggtatgagtgcactcatttgcggttctttagcgtatgataacatcatgtggtttccggactatttcaagaaccatattctgcccgatcgtgttcaccgcctcaatgtcagctttctggtatttgacatgcgtcgtgaatttggaggctgtgccggcaacattgcgtacaatctgcatctgttgggtggtcgcccgatcgtaatggctacggtgggccaagatttcggtccgtatcgcgaacacttcgaaactctgggcattgacttatcccgcgtcaagatcatcgatgatctgagtacaccgcaggggttcattaccaccgacatggatcaaaaccagattacggcgtttcacagcggcgcaatgatgcgttcgtacgaaaatcacgttcgtgatgtgccgggtgttaccttgggcctcgtaggtcctgatggacgcgagggcatgatccaaaatgccgaagaatttgctgctatgggcattccgttcatttttgacccaggtcaggcagtgcctctgttcagcggcccggaactgcgcgaatttatcgaacaggcggactatgtggtggtcaacgattacgaaagccgccttcttcaagcccgtactggctggaacgagcaggacattgttagccgcgtgcaggcgtatatcaccacgcaaggttcggctggagccgtggtaatgacaccggagaagcgctacgttattccggctgctaaaactcatcgtgtcgttgatccaactggttgcggcgacgcgtttcgcgccggcctgatctatggtattcagcatgaatatgattggttgaccattggccgcatgggaaacttaatgggtgcgctgaaagtggaacaccctggcacccaaaatcagcgtttcacctttgccgaattcaacgaccggttcaaacaatattttggctacgcgctc

SEQ ID NO: 1832 - protein, 321 aa, synthetic construct
  REGION 1..321: note = variant of adenosine kinase from Xanthemonas campestris
MHHHHHHGGSGMSALICGSLAYDNIMWFPDYFKNHILPDRVHRLNVSFLVFDMRREFGGCAGNIAYNLHLLGGRPIVMATVGQDFGPYREHFETLGIDLSRVKIIDDLSTPQGFITTDMDQNQITAFHSGAMMRSYENHVRDVPGVTLGLVGPDGREGMIQNAEEFAAMGIPFIFDPGQAVPLFSGPELREFIEQADYVVVNDYESRLLQARTGWNEQDIVSRVQAYITTQGSAGAVVMTPEKRYVIPAAKTHRVVDPTGCGDAFRAGLIYGIQHEYDWLTIGRMGNLMGALKVEHPGTQNQRFTFAEFNDRFKQYFGYAL

SEQ ID NO: 1833 - DNA, 963 bp, synthetic construct
  misc_feature 1..963: note = variant of adenosine kinase from Xanthemonas campestris
  source 1..963: mol_type = other DNA
atgcatcatcaccatcaccatggggggtccggtatgagtgcactcatttgcggttctttagcgtatgataacatcatgtggtttccggactatttcaagaaccatattctgcccgatcgtgttcaccgcctcaatgtcagctttctggtatttgacatgcgtcgtgaatttggaggctgtgccggcaacattgcgtacaatctgcatctgttgggtggtcgcccgatcgtaatggctacggtgggccaagatttcggtccgtatcgcgaacacttcgaaactctgggcattgacttatcccgcgtcaagatcatcgatgatctgagtacaccgcaggggttcattaccaccgacatggatcaaaaccagattacggcgtttcacagcggcgcaatgatgcgttcgtacgaaaatcacgttcgtgatgtgccgggtgttaccttgggcctcgtaggtcctgatggacgcgagggcatgatccaaaatgccgaagaatttgctgctatgggcattccgttcatttttgacccaggtcaggcagtgcctctgttcagcggcccggaactgcgcgaatttatcgaacaggcggactatgtggtggtcaacgattacgaaagccgccttcttcaagcccgtactggctggaacgagcaggacattgttagccgcgtgcaggcgtatatcaccacgcaaggttcggctggagccgtggtaatgacaccggagaagcgctacgttattccggctgctaaaactacgcgtgtcgttgatccaactggttgcggcgacgcgtttcgcgccggcctgatctatggtattcagcatgaatatgattggttgaccattggccgcatgggaaacttaatgggtgcgctgaaagtggaacaccctggcacccaaaatcagcgtttcacctttgccgaattcaacgaccggttcaaacaatattttggctacgcgctc

SEQ ID NO: 1834 - protein, 321 aa, synthetic construct
  REGION 1..321: note = variant of adenosine kinase from Xanthemonas campestris
MHHHHHHGGSGMSALICGSLAYDNIMWFPDYFKNHILPDRVHRLNVSFLVFDMRREFGGCAGNIAYNLHLLGGRPIVMATVGQDFGPYREHFETLGIDLSRVKIIDDLSTPQGFITTDMDQNQITAFHSGAMMRSYENHVRDVPGVTLGLVGPDGREGMIQNAEEFAAMGIPFIFDPGQAVPLFSGPELREFIEQADYVVVNDYESRLLQARTGWNEQDIVSRVQAYITTQGSAGAVVMTPEKRYVIPAAKTTRVVDPTGCGDAFRAGLIYGIQHEYDWLTIGRMGNLMGALKVEHPGTQNQRFTFAEFNDRFKQYFGYAL

SEQ ID NO: 1835 - DNA, 963 bp, synthetic construct
  misc_feature 1..963: note = variant of adenosine kinase from Xanthemonas campestris
  source 1..963: mol_type = other DNA
atgcatcatcaccatcaccatggggggtccggtatgagtgcactcatttgcggttctttagcgtatgataacatcatgtggtttccggactatttcaagaaccatattctgcccgatcgtgttcaccgcctcaatgtcagctttctggtatttgacatgcgtcgtgaatttggaggctgtgccggcaacattgcgtacaatctgcatctgttgggtggtcgcccgatcgtaatggctacggtgggccaagatttcggtccgtatcgcgaacacttcgaaactctgggcattgacttatcccgcgtcaagatcatcgatgatctgagtacaccgcaggggttcattaccaccgacatggatcaaaaccagattacggcgtttcacagcggcgcaatgatgcgttcgtacgaaaatcacgttcgtgatgtgccgggtgttaccttgggcctcgtaggtcctgatggacgcgagggcatgatccaaaatgccgaagaatttgctgctatgggcattccgttcatttttgacccaggtcaggcagtgcctctgttcagcggcccggaactgcgcgaatttatcgaacaggcggactatgtggtggtcaacgattacgaaagccgccttcttcaagcccgtactggctggaacgagcaggacattgttagccgcgtgcaggcgtatatcaccacgcaaggttcggctggagccgtggtaatgacaccggagaagcgctacgttattccggctgctaaaactcgtacggtcgttgatccaactggttgcggcgacgcgtttcgcgccggcctgatctatggtattcagcatgaatatgattggttgaccattggccgcatgggaaacttaatgggtgcgctgaaagtggaacaccctggcacccaaaatcagcgtttcacctttgccgaattcaacgaccggttcaaacaatattttggctacgcgctc

SEQ ID NO: 1836 - protein, 321 aa, synthetic construct
  REGION 1..321: note = variant of adenosine kinase from Xanthemonas campestris
MHHHHHHGGSGMSALICGSLAYDNIMWFPDYFKNHILPDRVHRLNVSFLVFDMRREFGGCAGNIAYNLHLLGGRPIVMATVGQDFGPYREHFETLGIDLSRVKIIDDLSTPQGFITTDMDQNQITAFHSGAMMRSYENHVRDVPGVTLGLVGPDGREGMIQNAEEFAAMGIPFIFDPGQAVPLFSGPELREFIEQADYVVVNDYESRLLQARTGWNEQDIVSRVQAYITTQGSAGAVVMTPEKRYVIPAAKTRTVVDPTGCGDAFRAGLIYGIQHEYDWLTIGRMGNLMGALKVEHPGTQNQRFTFAEFNDRFKQYFGYAL

SEQ ID NO: 1837 - DNA, 963 bp, synthetic construct
  misc_feature 1..963: note = variant of adenosine kinase from Xanthemonas campestris
  source 1..963: mol_type = other DNA
atgcatcatcaccatcaccatggggggtccggtatgagtgcactcatttgcggttctttagcgtatgataacatcatgtggtttccggactatttcaagaaccatattctgcccgatcgtgttcaccgcctcaatgtcagctttctggtatttgacatgcgtcgtgaatttggaggctgtgccggcaacattgcgtacaatctgcatctgttgggtggtcgcccgatcgtaatggctacggtgggccaagatttcggtccgtatcgcgaacacttcgaaactctgggcattgacttatcccgcgtcaagatcatcgatgatctgagtacaccgcaggggttcattaccaccgacatggatcaaaaccagattacggcgtttcacagcggcgcaatgatgcgttcgtacgaaaatcacgttcgtgatgtgccgggtgttaccttgggcctcgtaggtcctgatggacgcgagggcatgatccaaaatgccgaagaatttgctgctatgggcattccgttcatttttgacccaggtcaggcagtgcctctgttcagcggcccggaactgcgcgaatttatcgaacaggcggactatgtggtggtcaacgattacgaaagccgccttcttcaagcccgtactggctggaacgagcaggacattgttagccgcgtgcaggcgtatatcaccacgcaaggttcggctggagccgtggtaatgacaccggagaagcgctacgttattgaggctgctaaaactcgtcgtgtcgttgatccaactggttgcggcgacgcgtttcgcgccggcctgatctatggtattcagcatgaatatgattggttgaccattggccgcatgggaaacttaatgggtgcgctgaaagtggaacaccctggcacccaaaatcagcgtttcacctttgccgaattcaacgaccggttcaaacaatattttggctacgcgctc

SEQ ID NO: 1838 - protein, 321 aa, synthetic construct
  REGION 1..321: note = variant of adenosine kinase from Xanthemonas campestris
MHHHHHHGGSGMSALICGSLAYDNIMWFPDYFKNHILPDRVHRLNVSFLVFDMRREFGGCAGNIAYNLHLLGGRPIVMATVGQDFGPYREHFETLGIDLSRVKIIDDLSTPQGFITTDMDQNQITAFHSGAMMRSYENHVRDVPGVTLGLVGPDGREGMIQNAEEFAAMGIPFIFDPGQAVPLFSGPELREFIEQADYVVVNDYESRLLQARTGWNEQDIVSRVQAYITTQGSAGAVVMTPEKRYVIEAAKTRRVVDPTGCGDAFRAGLIYGIQHEYDWLTIGRMGNLMGALKVEHPGTQNQRFTFAEFNDRFKQYFGYAL

SEQ ID NO: 1839 - DNA, 963 bp, synthetic construct
  misc_feature 1..963: note = variant of adenosine kinase from Xanthemonas campestris
  source 1..963: mol_type = other DNA
atgcatcatcaccatcaccatggggggtccggtatgagtgcactcatttgcggttctttagcgtatgataacatcatgtggtttccggactatttcaagaaccatattctgcccgatcgtgttcaccgcctcaatgtcagctttctggtatttgacatgcgtcgtgaatttggaggctgtgccggcaacattgcgtacaatctgcatctgttgggtggtcgcccgatcgtaatggctacggtgggccaagatttcggtccgtatcgcgaacacttcgaaactctgggcattgacttatcccgcgtcaagatcatcgatgatctgagtacaccgcaggggttcattaccaccgacatggatcaaaaccagattacggcgtttcacagcggcgcaatgatgcgttcgtacgaaaatcacgttcgtgatgtgccgggtgttaccttgggcctcgtaggtcctgatggacgcgagggcatgatccaaaatgccgaagaatttgctgctatgggcattccgttcatttttgacccaggtcaggcagtgcctctgttcagcggcccggaactgcgcgaatttatcgaacaggcggactatgtggtggtcaacgattacgaaagccgccttcttcaagcccgtactggctggaacgagcaggacattgttagccgcgtgcaggcgtatatcaccacgcaaggttcggctggagccgtggtaatgacaccggagaagcgctacgttattccggctgctaaaactcgtatggtcgttgatccaactggttgcggcgacgcgtttcgcgccggcctgatctatggtattcagcatgaatatgattggttgaccattggccgcatgggaaacttaatgggtgcgctgaaagtggaacaccctggcacccaaaatcagcgtttcacctttgccgaattcaacgaccggttcaaacaatattttggctacgcgctc

SEQ ID NO: 1840 - protein, 321 aa, synthetic construct
  REGION 1..321: note = variant of adenosine kinase from Xanthemonas campestris
MHHHHHHGGSGMSALICGSLAYDNIMWFPDYFKNHILPDRVHRLNVSFLVFDMRREFGGCAGNIAYNLHLLGGRPIVMATVGQDFGPYREHFETLGIDLSRVKIIDDLSTPQGFITTDMDQNQITAFHSGAMMRSYENHVRDVPGVTLGLVGPDGREGMIQNAEEFAAMGIPFIFDPGQAVPLFSGPELREFIEQADYVVVNDYESRLLQARTGWNEQDIVSRVQAYITTQGSAGAVVMTPEKRYVIPAAKTRMVVDPTGCGDAFRAGLIYGIQHEYDWLTIGRMGNLMGALKVEHPGTQNQRFTFAEFNDRFKQYFGYAL

SEQ ID NO: 1841 - DNA, 963 bp, synthetic construct
  misc_feature 1..963: note = variant of adenosine kinase from Xanthemonas campestris
  source 1..963: mol_type = other DNA
atgcatcatcaccatcaccatggggggtccggtatgagtgcactcatttgcggttctttagcgtatgataacatcatgtggtttccggactatttcaagaaccatattctgcccgatcgtgttcaccgcctcaatgtcagctttctggtatttgacatgcgtcgtgaatttggaggctgtgccggcaacattgcgtacaatctgcatctgttgggtggtcgcccgatcgtaatggctacggtgggccaagatttcggtccgtatcgcgaacacttcgaaactctgggcattgacttatcccgcgtcaagatcatcgatgatctgagtacaccgcaggggttcattaccaccgacatggatcaaaaccagattacggcgtttcacagcggcgcaatgatgcgttcgtacgaaaatcacgttcgtgatgtgccgggtgttaccttgggcctcgtaggtcctgatggacgcgagggcatgatccaaaatgccgaagaatttgctgctatgggcattccgttcatttttgacccaggtcaggcagtgcctctgttcagcggcccggaactgcgcgaatttatcgaacaggcggactatgtggtggtcaacgattacgaaagccgccttcttcaagcccgtactggctggaacgagcaggacattgttagccgcgtgcaggcgtatatcgtgacgcaaggttcggctggagccgtggtaatgacaccggagaagcgctacgttattccggctgctaaaactcgtcgtgtcgttgatccaactggttgcggcgacgcgtttcgcgccggcctgatctatggtattcagcatgaatatgattggttgaccattggccgcatgggaaacttaatgggtgcgctgaaagtggaacaccctggcacccaaaatcagcgtttcacctttgccgaattcaacgaccggttcaaacaatattttggctacgcgctc

SEQ ID NO: 1842 - protein, 321 aa, synthetic construct
  REGION 1..321: note = variant of adenosine kinase from Xanthemonas campestris
MHHHHHHGGSGMSALICGSLAYDNIMWFPDYFKNHILPDRVHRLNVSFLVFDMRREFGGCAGNIAYNLHLLGGRPIVMATVGQDFGPYREHFETLGIDLSRVKIIDDLSTPQGFITTDMDQNQITAFHSGAMMRSYENHVRDVPGVTLGLVGPDGREGMIQNAEEFAAMGIPFIFDPGQAVPLFSGPELREFIEQADYVVVNDYESRLLQARTGWNEQDIVSRVQAYIVTQGSAGAVVMTPEKRYVIPAAKTRRVVDPTGCGDAFRAGLIYGIQHEYDWLTIGRMGNLMGALKVEHPGTQNQRFTFAEFNDRFKQYFGYAL

SEQ ID NO: 1843 - DNA, 963 bp, synthetic construct
  misc_feature 1..963: note = variant of adenosine kinase from Xanthemonas campestris
  source 1..963: mol_type = other DNA
atgcatcatcaccatcaccatggggggtccggtatgagtgcactcatttgcggttctttagcgtatgataacatcatgtggtttccggactatttcaagaaccatattctgcccgatcgtgttcaccgcctcaatgtcagctttctggtatttgacatgcgtcgtgaatttggaggctgtgccggcaacattgcgtacaatctgcatctgttgggtggtcgcccgatcgtaatggctacggtgggccaagatttcggtccgtatcgcgaacacttcgaaactctgggcattgacttatcccgcgtcaagatcatcgatgatctgagtacaccgcaggggttcattaccaccgacatggatcaaaaccagattacggcgtttcacagcggcgcaatgatgcgttcgtacgaaaatcacgttcgtgatgtgccgggtgttaccttgggcctcgtaggtcctgatggacgcgagggcatgatccaaaatgccgaagaatttgctgctatgggcattccgttcatttttgacccaggtcaggcagtgcctctgttcagcggcccggaactgcgcgaatttatcgaacaggcggactatgtggtggtcaacgattacgaaagccgccttcttcaagcccgtactggctggaacgagcaggacattgttagccgcgtgcaggcgtatatcaccacgcaaggttcggctggagccgtggtaatgacaccggagaagcgctacgttattccggctgctaaaactgtgcgtgtcgttgatccaactggttgcggcgacgcgtttcgcgccggcctgatctatggtattcagcatgaatatgattggttgaccattggccgcatgggaaacttaatgggtgcgctgaaagtggaacaccctggcacccaaaatcagcgtttcacctttgccgaattcaacgaccggttcaaacaatattttggctacgcgctc

SEQ ID NO: 1844 - protein, 321 aa, synthetic construct
  REGION 1..321: note = variant of adenosine kinase from Xanthemonas campestris
MHHHHHHGGSGMSALICGSLAYDNIMWFPDYFKNHILPDRVHRLNVSFLVFDMRREFGGCAGNIAYNLHLLGGRPIVMATVGQDFGPYREHFETLGIDLSRVKIIDDLSTPQGFITTDMDQNQITAFHSGAMMRSYENHVRDVPGVTLGLVGPDGREGMIQNAEEFAAMGIPFIFDPGQAVPLFSGPELREFIEQADYVVVNDYESRLLQARTGWNEQDIVSRVQAYITTQGSAGAVVMTPEKRYVIPAAKTVRVVDPTGCGDAFRAGLIYGIQHEYDWLTIGRMGNLMGALKVEHPGTQNQRFTFAEFNDRFKQYFGYAL

SEQ ID NO: 1845 - DNA, 963 bp, synthetic construct
  misc_feature 1..963: note = variant of adenosine kinase from Xanthemonas campestris
  source 1..963: mol_type = other DNA
atgcatcatcaccatcaccatggggggtccggtatgagtgcactcatttgcggttctttagcgtatgataacatcatgtggtttccggactatttcaagaaccatattctgcccgatcgtgttcaccgcctcaatgtcagctttctggtatttgacatgcgtcgtgaatttggaggctgtgccggcaacattgcgtacaatctgcatctgttgggtggtcgcccgatcgtaatggctacggtgggccaagatttcggtccgtatcgcgaacacttcgaaactctgggcattgacttatcccgcgtcaagatcatcgatgatctgagtacaccgcaggggttcattaccaccgacatggatcaaaaccagattacggcgtttcacagcggcgcaatgatgcgttcgtacgaaaatcacgttcgtgatgtgccgggtgttaccttgggcctcgtaggtcctgatggacgcgagggcatgatccaaaatgccgaagaatttgctgctatgggcattccgttcatttttgacccaggtcaggcagtgcctctgttcagcggcccggaactgcgcgaatttatcgaacaggcggactatgtggtggtcaacgattacgaaagccgccttcttcaagcccgtactggctggaacgagcaggacattgttagccgcgtgcaggcgtatatctgtacgcaaggttcggctggagccgtggtaatgacaccggagaagcgctacgttattccggctgctaaaactcgtcgtgtcgttgatccaactggttgcggcgacgcgtttcgcgccggcctgatctatggtattcagcatgaatatgattggttgaccattggccgcatgggaaacttaatgggtgcgctgaaagtggaacaccctggcacccaaaatcagcgtttcacctttgccgaattcaacgaccggttcaaacaatattttggctacgcgctc

SEQ ID NO: 1846 - protein, 321 aa, synthetic construct
  REGION 1..321: note = variant of adenosine kinase from Xanthemonas campestris
MHHHHHHGGSGMSALICGSLAYDNIMWFPDYFKNHILPDRVHRLNVSFLVFDMRREFGGCAGNIAYNLHLLGGRPIVMATVGQDFGPYREHFETLGIDLSRVKIIDDLSTPQGFITTDMDQNQITAFHSGAMMRSYENHVRDVPGVTLGLVGPDGREGMIQNAEEFAAMGIPFIFDPGQAVPLFSGPELREFIEQADYVVVNDYESRLLQARTGWNEQDIVSRVQAYICTQGSAGAVVMTPEKRYVIPAAKTRRVVDPTGCGDAFRAGLIYGIQHEYDWLTIGRMGNLMGALKVEHPGTQNQRFTFAEFNDRFKQYFGYAL

SEQ ID NO: 1847 - DNA, 963 bp, synthetic construct
  misc_feature 1..963: note = variant of adenosine kinase from Xanthemonas campestris
  source 1..963: mol_type = other DNA
atgcatcatcaccatcaccatggggggtccggtatgagtgcactcatttgcggttctttagcgtatgataacatcatgtggtttccggactatttcaagaaccatattctgcccgatcgtgttcaccgcctcaatgtcagctttctggtatttgacatgcgtcgtgaatttggaggctgtgccggcaacattgcgtacaatctgcatctgttgggtggtcgcccgatcgtaatggctacggtgggccaagatttcggtccgtatcgcgaacacttcgaaactctgggcattgacttatcccgcgtcaagatcatcgatgatctgagtacaccgcaggggttcattaccaccgacatggatcaaaaccagattacggcgtttgttagcggcgcaatgatgcgttcgtacgaaaatcacgttcgtgatgtgccgggtgttaccttgggcctcgtaggtcctgatggacgcgagggcatgatccaaaatgccgaagaatttgctgctatgggcattccgttcatttttgacccaggtcaggcagtgcctctgttcagcggcccggaactgcgcgaatttatcgaacaggcggactatgtggtggtcaacgattacgaaagccgccttcttcaagcccgtactggctggaacgagcaggacattgttagccgcgtgcaggcgtatatcaccacgcaaggttcggctggagccgtggtaatgacaccggagaagcgctacgttattccggctgctaaaactcgtcgtgtcgttgatccaactggttgcggcgacgcgtttcgcgccggcctgatctatggtattcagcatgaatatgattggttgaccattggccgcatgggaaacttaatgggtgcgctgaaagtggaacaccctggcacccaaaatcagcgtttcacctttgccgaattcaacgaccggttcaaacaatattttggctacgcgctc

SEQ ID NO: 1848 - protein, 321 aa, synthetic construct
  REGION 1..321: note = variant of adenosine kinase from Xanthemonas campestris
MHHHHHHGGSGMSALICGSLAYDNIMWFPDYFKNHILPDRVHRLNVSFLVFDMRREFGGCAGNIAYNLHLLGGRPIVMATVGQDFGPYREHFETLGIDLSRVKIIDDLSTPQGFITTDMDQNQITAFVSGAMMRSYENHVRDVPGVTLGLVGPDGREGMIQNAEEFAAMGIPFIFDPGQAVPLFSGPELREFIEQADYVVVNDYESRLLQARTGWNEQDIVSRVQAYITTQGSAGAVVMTPEKRYVIPAAKTRRVVDPTGCGDAFRAGLIYGIQHEYDWLTIGRMGNLMGALKVEHPGTQNQRFTFAEFNDRFKQYFGYAL

SEQ ID NO: 1849 - DNA, 963 bp, synthetic construct
  misc_feature 1..963: note = variant of adenosine kinase from Xanthemonas campestris
  source 1..963: mol_type = other DNA
atgcatcatcaccatcaccatggggggtccggtatgagtgcactcatttgcggttctttagcgtatgataacatcatgtggtttccggactatttcaagaaccatattctgcccgatcgtgttcaccgcctcaatgtcagctttctggtatttgacatgcgtcgtgaatttggaggctgtgccggcaacattgcgtacaatctgcatctgttgggtggtcgcccgatcgtaatggctacggtgggccaagatttcggtccgtatcgcgaacacttcgaaactctgggcattgacttatcccgcgtcaagatcatcgatgatctgagtacaccgcaggggttcattaccaccgacatggatcaaaaccagattacggcgtttcacagcggcgcaatgatgcgttcgtacgaaaatcacgttcgtgatgtgccgggtgttaccttgggcctcgtaggtcctgatggacgcgagggcatgatccaaaatgccgaagaatttgctgctatgggcattccgttcatttttgacccaggtcaggcagtgcctctgttcagcggcccggaactgcgcgaatttatcgaacaggcggactatgtggtggtcaacgattacgaaagccgccttcttcaagcccgtactggctggaacgagcaggacattgttagccgcgtgcaggcgtatatcaccacgcaaggttcggctggagccgtggtaatgacaccggagaagcgctacgttattccggctgctaaaactcgtcgtgtcgttgatccaactggttgcggcgacgcgtttcgcgccggcctgatctatggtattcagcatgaatatgattggttgaccattggccgcatgggaaacttaatgggtgcgctgaaagtggaacaccctggcgggcaaaatcagcgtttcacctttgccgaattcaacgaccggttcaaacaatattttggctacgcgctc

SEQ ID NO: 1850 - protein, 321 aa, synthetic construct
  REGION 1..321: note = variant of adenosine kinase from Xanthemonas campestris
MHHHHHHGGSGMSALICGSLAYDNIMWFPDYFKNHILPDRVHRLNVSFLVFDMRREFGGCAGNIAYNLHLLGGRPIVMATVGQDFGPYREHFETLGIDLSRVKIIDDLSTPQGFITTDMDQNQITAFHSGAMMRSYENHVRDVPGVTLGLVGPDGREGMIQNAEEFAAMGIPFIFDPGQAVPLFSGPELREFIEQADYVVVNDYESRLLQARTGWNEQDIVSRVQAYITTQGSAGAVVMTPEKRYVIPAAKTRRVVDPTGCGDAFRAGLIYGIQHEYDWLTIGRMGNLMGALKVEHPGGQNQRFTFAEFNDRFKQYFGYAL

SEQ ID NO: 1851 - DNA, 963 bp, synthetic construct
  misc_feature 1..963: note = variant of adenosine kinase from Xanthemonas campestris
  source 1..963: mol_type = other DNA
atgcatcatcaccatcaccatggggggtccggtatgagtgcactcatttgcggttctttagcgtatgataacatcatgtggtttccggactatttcaagaaccatattctgcccgatcgtgttcaccgcctcaatgtcagctttctggtatttgacatgcgtcgtgaatttggaggctgtgccggcaacattgcgtacaatctgcatctgttgggtggtcgcccgatcgtaatggctacggtgggccaagatttcggtccgtatcgcgaacacttcgaaactctgggcattgacttatcccgcgtcaagatcatcgatgatctgagtacaccgcaggggttcattaccaccgacatggatcaaaaccagattacggcgtttcacagcggcgcaatgatgcgttcgtacgaaaatcacgttcgtgatgtgccgggtgttaccttgggcctcgtaggtcctgatggacgcgagggcatgatccaaaatgccgaagaatttgctgctatgggcattccgttcatttttgacccaggtcaggcagtgcctctgttcagcggcccggaactgcgcgaatttatcgaacaggcggactatgtggtggtcaacgattacgaaagccgccttcttcaagcccgtactggctggaacgagcaggacattgttagccgcgtgcaggcgtatatcaccacgcaaggttcggctggagccgtggtaatgacaccggagaagcgctacgttattccggctgctaaaactcgtcgtgtcgttgatccaactggttgcggcgacgcgtttcgcgccggcctgatctatggtattcagcatgaatatgattggttgaccattggccgcatgggaaacttaatgggtgcgattaaagtggaacaccctggcacccaaaatcagcgtttcacctttgccgaattcaacgaccggttcaaacaatattttggctacgcgctc

SEQ ID NO: 1852 - protein, 321 aa, synthetic construct
  REGION 1..321: note = variant of adenosine kinase from Xanthemonas campestris
MHHHHHHGGSGMSALICGSLAYDNIMWFPDYFKNHILPDRVHRLNVSFLVFDMRREFGGCAGNIAYNLHLLGGRPIVMATVGQDFGPYREHFETLGIDLSRVKIIDDLSTPQGFITTDMDQNQITAFHSGAMMRSYENHVRDVPGVTLGLVGPDGREGMIQNAEEFAAMGIPFIFDPGQAVPLFSGPELREFIEQADYVVVNDYESRLLQARTGWNEQDIVSRVQAYITTQGSAGAVVMTPEKRYVIPAAKTRRVVDPTGCGDAFRAGLIYGIQHEYDWLTIGRMGNLMGAIKVEHPGTQNQRFTFAEFNDRFKQYFGYAL

SEQ ID NO: 1853 - DNA, 963 bp, synthetic construct
  misc_feature 1..963: note = variant of adenosine kinase from Xanthemonas campestris
  source 1..963: mol_type = other DNA
atgcatcatcaccatcaccatggggggtccggtatgagtgcactcatttgcggttctttagcgtatgataacatcatgtggtttccggactatttcaagaaccatattctgcccgatcgtgttcaccgcctcaatgtcagctttctggtatttgacatgcgtcgtgaatttggaggctgtgccggcaacattgcgtacaatctgcatctgttgggtggtcgcccgatcgtaatggctacggtgggccaagatttcggtccgtatcgcgaacacttcgaaactctgggcattgacttatcccgcgtcaagatcatcgatgatctgagtacaccgcaggggttcattaccaccgacatggatcaaaaccagattacgctttttcacagcggcgcaatgatgcgttcgtacgaaaatcacgttcgtgatgtgccgggtgttaccttgggcctcgtaggtcctgatggacgcgagggcatgatccaaaatgccgaagaatttgctgctatgggcattccgttcatttttgacccaggtcaggcagtgcctctgttcagcggcccggaactgcgcgaatttatcgaacaggcggactatgtggtggtcaacgattacgaaagccgccttcttcaagcccgtactggctggaacgagcaggacattgttagccgcgtgcaggcgtatatcaccacgcaaggttcggctggagccgtggtaatgacaccggagaagcgctacgttattccggctgctaaaactcgtcgtgtcgttgatccaactggttgcggcgacgcgtttcgcgccggcctgatctatggtattcagcatgaatatgattggttgaccattggccgcatgggaaacttaatgggtgcgctgaaagtggaacaccctggcacccaaaatcagcgtttcacctttgccgaattcaacgaccggttcaaacaatattttggctacgcgctc

SEQ ID NO: 1854 - protein, 321 aa, synthetic construct
  REGION 1..321: note = variant of adenosine kinase from Xanthemonas campestris
MHHHHHHGGSGMSALICGSLAYDNIMWFPDYFKNHILPDRVHRLNVSFLVFDMRREFGGCAGNIAYNLHLLGGRPIVMATVGQDFGPYREHFETLGIDLSRVKIIDDLSTPQGFITTDMDQNQITLFHSGAMMRSYENHVRDVPGVTLGLVGPDGREGMIQNAEEFAAMGIPFIFDPGQAVPLFSGPELREFIEQADYVVVNDYESRLLQARTGWNEQDIVSRVQAYITTQGSAGAVVMTPEKRYVIPAAKTRRVVDPTGCGDAFRAGLIYGIQHEYDWLTIGRMGNLMGALKVEHPGTQNQRFTFAEFNDRFKQYFGYAL

SEQ ID NO: 1855 - DNA, 963 bp, synthetic construct
  misc_feature 1..963: note = variant of adenosine kinase from Xanthemonas campestris
  source 1..963: mol_type = other DNA
atgcatcatcaccatcaccatggggggtccggtatgagtgcactcatttgcggttctttagcgtatgataacatcatgtggtttccggactatttcaagaaccatattctgcccgatcgtgttcaccgcctcaatgtcagctttctggtatttgacatgcgtcgtgaatttggaggctgtgccggcaacattgcgtacaatctgcatctgttgggtggtcgcccgatcgtaatggctacggtgggccaagatttcggtccgtatcgcgaacacttcgaaactctgggcattgacttatcccgcgtcaagatcatcgatgatctgagtacaccgcaggggttcattaccaccgacatggatcaaaaccagattacggcgtttcacagcggcgcaatgatgcgttcgtacgaaaatcacgttcgtgatgtgccgggtgttaccttgggcctcgtaggtcctgatggacgcgagggcatgatccaaaatgccgaagaatttgctgctatgggcattccgttcatttttgacccaggtcaggcagtgcctctgttcagcggcccggaactgcgcgaatttatcgaacaggcggactatgtggtggtcaacgattacgaaagccgccttcttcaagcccgtactggctggaacgagcaggacattgttagccgcgtgcaggcgtatatcaccacgcaaggttcggctggagccgtggtaatgacaccggagaagcgctacgttattccggctgctaaaactcgtcgtgtcgttgatccaactggttgcggcgacgcgtttcgcgccggcctgatctatggtattcagcatgaatatgattggttgaccattggccgcatgggaaacttaatgggtgcgctgatggtggaacaccctggcacccaaaatcagcgtttcacctttgccgaattcaacgaccggttcaaacaatattttggctacgcgctc

SEQ ID NO: 1856 - protein, 321 aa, synthetic construct
  REGION 1..321: note = variant of adenosine kinase from Xanthemonas campestris
MHHHHHHGGSGMSALICGSLAYDNIMWFPDYFKNHILPDRVHRLNVSFLVFDMRREFGGCAGNIAYNLHLLGGRPIVMATVGQDFGPYREHFETLGIDLSRVKIIDDLSTPQGFITTDMDQNQITAFHSGAMMRSYENHVRDVPGVTLGLVGPDGREGMIQNAEEFAAMGIPFIFDPGQAVPLFSGPELREFIEQADYVVVNDYESRLLQARTGWNEQDIVSRVQAYITTQGSAGAVVMTPEKRYVIPAAKTRRVVDPTGCGDAFRAGLIYGIQHEYDWLTIGRMGNLMGALMVEHPGTQNQRFTFAEFNDRFKQYFGYAL

SEQ ID NO: 1857 - DNA, 963 bp, synthetic construct
  misc_feature 1..963: note = variant of adenosine kinase from Xanthemonas campestris
  source 1..963: mol_type = other DNA
atgcatcatcaccatcaccatggggggtccggtatgagtgcactcatttgcggttctttagcgtatgataacatcatgtggtttccggactatttcaagaaccatattctgcccgatcgtgttcaccgcctcaatgtcagctttctggtatttgacatgcgtcgtgaatttggaggctgtgccggcaacattgcgtacaatctgcatctgttgggtggtcgcccgatcgtaatggctacggtgggccaagatttcggtccgtatcgcgaacacttcgaaactctgggcattgacttatcccgcgtcaagatcatcgatgatctgagtacaccgcaggggttcattaccaccgacatggatcaaaaccagattacggcgtttcacagcggcgcaatgatgcgttcgtacgaaaatcacgttcgtgatgtgccgggtgttaccttgggcctcgtaggtcctgatactcgcgagggcatgatccaaaatgccgaagaatttgctgctatgggcattccgttcatttttgacccaggtcaggcagtgcctctgttcagcggcccggaactgcgcgaatttatcgaacaggcggactatgtggtggtcaacgattacgaaagccgccttcttcaagcccgtactggctggaacgagcaggacattgttagccgcgtgcaggcgtatatcaccacgcaaggttcggctggagccgtggtaatgacaccggagaagcgctacgttattccggctgctaaaactcgtcgtgtcgttgatccaactggttgcggcgacgcgtttcgcgccggcctgatctatggtattcagcatgaatatgattggttgaccattggccgcatgggaaacttaatgggtgcgctgaaagtggaacaccctggcacccaaaatcagcgtttcacctttgccgaattcaacgaccggttcaaacaatattttggctacgcgctc

SEQ ID NO: 1858 - protein, 321 aa, synthetic construct
  REGION 1..321: note = variant of adenosine kinase from Xanthemonas campestris
MHHHHHHGGSGMSALICGSLAYDNIMWFPDYFKNHILPDRVHRLNVSFLVFDMRREFGGCAGNIAYNLHLLGGRPIVMATVGQDFGPYREHFETLGIDLSRVKIIDDLSTPQGFITTDMDQNQITAFHSGAMMRSYENHVRDVPGVTLGLVGPDTREGMIQNAEEFAAMGIPFIFDPGQAVPLFSGPELREFIEQADYVVVNDYESRLLQARTGWNEQDIVSRVQAYITTQGSAGAVVMTPEKRYVIPAAKTRRVVDPTGCGDAFRAGLIYGIQHEYDWLTIGRMGNLMGALKVEHPGTQNQRFTFAEFNDRFKQYFGYAL

SEQ ID NO: 1859 - DNA, 963 bp, synthetic construct
  misc_feature 1..963: note = variant of adenosine kinase from Xanthemonas campestris
  source 1..963: mol_type = other DNA
atgcatcatcaccatcaccatggggggtccggtatgagtgcactcatttgcggttctttagcgtatgataacatcatgtggtttccggactatttcaagaaccatattctgcccgatcgtgttcaccgcctcaatgtcagctttctggtatttgacatgcgtcgtgaatttggaggctgtgccggcaacattgcgtacaatctgcatctgttgggtggtcgcccgatcgtaatggctacggtgggccaagatttcggtccgtatcgcgaacacttcgaaactctgggcattgacttatcccgcgtcaagatcatcgatgatctgagtacaccgcaggggttcattaccaccgacatggatcaaaaccagattacggcgtttcacagcggcgcaatgatgcgttcgtacgaaaatcacgttcgtgatgtgccgggtgttaccttgggcctcgtaggtcctgatggacgcgagggcatgatccaaaatgccgaagaatttgctgctatgggcattccgttcatttttgacccaggtcaggcagtgcctgtgttcagcggcccggaactgcgcgaatttatcgaacaggcggactatgtggtggtcaacgattacgaaagccgccttcttcaagcccgtactggctggaacgagcaggacattgttagccgcgtgcaggcgtatatcaccacgcaaggttcggctggagccgtggtaatgacaccggagaagcgctacgttattccggctgctaaaactcgtcgtgtcgttgatccaactggttgcggcgacgcgtttcgcgccggcctgatctatggtattcagcatgaatatgattggttgaccattggccgcatgggaaacttaatgggtgcgctgaaagtggaacaccctggcacccaaaatcagcgtttcacctttgccgaattcaacgaccggttcaaacaatattttggctacgcgctc

SEQ ID NO: 1860 - protein, 321 aa, synthetic construct
  REGION 1..321: note = variant of adenosine kinase from Xanthemonas campestris
MHHHHHHGGSGMSALICGSLAYDNIMWFPDYFKNHILPDRVHRLNVSFLVFDMRREFGGCAGNIAYNLHLLGGRPIVMATVGQDFGPYREHFETLGIDLSRVKIIDDLSTPQGFITTDMDQNQITAFHSGAMMRSYENHVRDVPGVTLGLVGPDGREGMIQNAEEFAAMGIPFIFDPGQAVPVFSGPELREFIEQADYVVVNDYESRLLQARTGWNEQDIVSRVQAYITTQGSAGAVVMTPEKRYVIPAAKTRRVVDPTGCGDAFRAGLIYGIQHEYDWLTIGRMGNLMGALKVEHPGTQNQRFTFAEFNDRFKQYFGYAL

SEQ ID NO: 1861 - DNA, 963 bp, synthetic construct
  misc_feature 1..963: note = variant of adenosine kinase from Xanthemonas campestris
  source 1..963: mol_type = other DNA
atgcatcatcaccatcaccatggggggtccggtatgagtgcactcatttgcggttctttagcgtatgataacatcatgtggtttccggactatttcaagaaccatattctgcccgatcgtgttcaccgcctcaatgtcagctttctggtatttgacatgcgtcgtgaatttggaggctgtgccggcaacattgcgtacaatctgcatctgttgggtggtcgcccgatcgtaatggctacggtgggccaagatttcggtccgtatcgcgaacacttcgaaactctgggcattgacttatcccgcgtcaagatcatcgatgatctgagtacaccgcaggggttcattaccaccgacatggatcaaaaccagattacggcgtttcacagcggcgcaatgatgcgttcgtacgaaaatcacgttcgtgatgtgccgggtgttaccttgggcctcgtaggtcctgatggacgcgagggcatgatccaaaatgccgaagaatttgctgctatgggcattccgttcatttttgacccaggtaatgcagtgcctctgttcagcggcccggaactgcgcgaatttatcgaacaggcggactatgtggtggtcaacgattacgaaagccgccttcttcaagcccgtactggctggaacgagcaggacattgttagccgcgtgcaggcgtatatcaccacgcaaggttcggctggagccgtggtaatgacaccggagaagcgctacgttattccggctgctaaaactcgtcgtgtcgttgatccaactggttgcggcgacgcgtttcgcgccggcctgatctatggtattcagcatgaatatgattggttgaccattggccgcatgggaaacttaatgggtgcgctgaaagtggaacaccctggcacccaaaatcagcgtttcacctttgccgaattcaacgaccggttcaaacaatattttggctacgcgctc

SEQ ID NO: 1862 - protein, 321 aa, synthetic construct
  REGION 1..321: note = variant of adenosine kinase from Xanthemonas campestris
MHHHHHHGGSGMSALICGSLAYDNIMWFPDYFKNHILPDRVHRLNVSFLVFDMRREFGGCAGNIAYNLHLLGGRPIVMATVGQDFGPYREHFETLGIDLSRVKIIDDLSTPQGFITTDMDQNQITAFHSGAMMRSYENHVRDVPGVTLGLVGPDGREGMIQNAEEFAAMGIPFIFDPGNAVPLFSGPELREFIEQADYVVVNDYESRLLQARTGWNEQDIVSRVQAYITTQGSAGAVVMTPEKRYVIPAAKTRRVVDPTGCGDAFRAGLIYGIQHEYDWLTIGRMGNLMGALKVEHPGTQNQRFTFAEFNDRFKQYFGYAL

SEQ ID NO: 1863 - DNA, 963 bp, synthetic construct
  misc_feature 1..963: note = variant of adenosine kinase from Xanthemonas campestris
  source 1..963: mol_type = other DNA
atgcatcatcaccatcaccatggggggtccggtatgagtgcactcatttgcggttctttagcgtatgataacatcatgtggtttccggactatttcaagaaccatattctgcccgatcgtgttcaccgcctcaatgtcagctttctggtatttgacatgcgtcgtgaatttggaggctgtgccggcaacattgcgtacaatctgcatctgttgggtggtcgcccgatcgtaatggctacggtgggccaagatttcggtccgtatcgcgaacacttcgaaactctgggcattgacttatcccgcgtcaagatcatcgatgatctgagtacaccgattgggttcattaccaccgacatggatcaaaaccagattacggcgtttcacagcggcgcaatgatgcgttcgtacgaaaatcacgttcgtgatgtgccgggtgttaccttgggcctcgtaggtcctgatggacgcgagggcatgatccaaaatgccgaagaatttgctgctatgggcattccgttcatttttgacccaggtcaggcagtgcctctgttcagcggcccggaactgcgcgaatttatcgaacaggcggactatgtggtggtcaacgattacgaaagccgccttcttcaagcccgtactggctggaacgagcaggacattgttagccgcgtgcaggcgtatatcaccacgcaaggttcggctggagccgtggtaatgacaccggagaagcgctacgttattccggctgctaaaactcgtcgtgtcgttgatccaactggttgcggcgacgcgtttcgcgccggcctgatctatggtattcagcatgaatatgattggttgaccattggccgcatgggaaacttaatgggtgcgctgaaagtggaacaccctggcacccaaaatcagcgtttcacctttgccgaattcaacgaccggttcaaacaatattttggctacgcgctc

SEQ ID NO: 1864 - protein, 321 aa, synthetic construct
  REGION 1..321: note = variant of adenosine kinase from Xanthemonas campestris
MHHHHHHGGSGMSALICGSLAYDNIMWFPDYFKNHILPDRVHRLNVSFLVFDMRREFGGCAGNIAYNLHLLGGRPIVMATVGQDFGPYREHFETLGIDLSRVKIIDDLSTPIGFITTDMDQNQITAFHSGAMMRSYENHVRDVPGVTLGLVGPDGREGMIQNAEEFAAMGIPFIFDPGQAVPLFSGPELREFIEQADYVVVNDYESRLLQARTGWNEQDIVSRVQAYITTQGSAGAVVMTPEKRYVIPAAKTRRVVDPTGCGDAFRAGLIYGIQHEYDWLTIGRMGNLMGALKVEHPGTQNQRFTFAEFNDRFKQYFGYAL

SEQ ID NO: 1865 - DNA, 963 bp, synthetic construct
  misc_feature 1..963: note = variant of adenosine kinase from Xanthemonas campestris
  source 1..963: mol_type = other DNA
atgcatcatcaccatcaccatggggggtccggtatgagtgcactcatttgcggttctttagcgtatgataacatcatgtggtttccggactatttcaagtgtcatattctgcccgatcgtgttcaccgcctcaatgtcagctttctggtatttgacatgcgtcgtgaatttggaggctgtgccggcaacattgcgtacaatctgcatctgttgggtggtcgcccgatcgtaatggctacggtgggccaagatttcggtccgtatcgcgaacacttcgaaactctgggcattgacttatcccgcgtcaagatcatcgatgatctgagtacaccgcaggggttcattaccaccgacatggatcaaaaccagattacggcgtttcacagcggcgcaatgatgcgttcgtacgaaaatcacgttcgtgatgtgccgggtgttaccttgggcctcgtaggtcctgatggacgcgagggcatgatccaaaatgccgaagaatttgctgctatgggcattccgttcatttttgacccaggtcaggcagtgcctctgttcagcggcccggaactgcgcgaatttatcgaacaggcggactatgtggtggtcaacgattacgaaagccgccttcttcaagcccgtactggctggaacgagcaggacattgttagccgcgtgcaggcgtatatcaccacgcaaggttcggctggagccgtggtaatgacaccggagaagcgctacgttattccggctgctaaaactcgtcgtgtcgttgatccaactggttgcggcgacgcgtttcgcgccggcctgatctatggtattcagcatgaatatgattggttgaccattggccgcatgggaaacttaatgggtgcgctgaaagtggaacaccctggcacccaaaatcagcgtttcacctttgccgaattcaacgaccggttcaaacaatattttggctacgcgctc

SEQ ID NO: 1866 - protein, 321 aa, synthetic construct
  REGION 1..321: note = variant of adenosine kinase from Xanthemonas campestris
MHHHHHHGGSGMSALICGSLAYDNIMWFPDYFKCHILPDRVHRLNVSFLVFDMRREFGGCAGNIAYNLHLLGGRPIVMATVGQDFGPYREHFETLGIDLSRVKIIDDLSTPQGFITTDMDQNQITAFHSGAMMRSYENHVRDVPGVTLGLVGPDGREGMIQNAEEFAAMGIPFIFDPGQAVPLFSGPELREFIEQADYVVVNDYESRLLQARTGWNEQDIVSRVQAYITTQGSAGAVVMTPEKRYVIPAAKTRRVVDPTGCGDAFRAGLIYGIQHEYDWLTIGRMGNLMGALKVEHPGTQNQRFTFAEFNDRFKQYFGYAL

SEQ ID NO: 1867 - DNA, 963 bp, synthetic construct
  misc_feature 1..963: note = variant of adenosine kinase from Xanthemonas campestris
  source 1..963: mol_type = other DNA
atgcatcatcaccatcaccatggggggtccggtatgagtgcactcatttgcggttctttagcgtatgataacatcatgtggtttccggactatttcaagaaccatattctgcccgatcgtgttcaccgcctcaatgtcagctttctggtatttgacatgcgtcgtgaatttggaggctgtgccggcaacattgcgtacaatctgcatctgttgggtggtcgcccgatcgtaatggctacggtgggccaagatttcggtccgtatcgcgaacacttcgaaactctgggcattgacttatcccgcgtcaagatcatcgatgatctgagtacaccgcaggggttcattaccaccgacatggatcaaaaccagattacggcgtttcacagcggcgcaatgatgcgttcgtacgaaaatcacgttcgtgatgtgccgggtgttaccttgggcctcgtaggtcctgatggacgcgagggcatgatccaaaatgccgaagaatttgctgctatgggcattccgttcatttttgacccaggtcaggcagtgcctctgttcagcggcccggaactgcgcgaatttatcgaacaggcggactatgtggtggtcaacgattacgaaagccgccttcttcaagcccgtactggctggaacgagcaggacattgttagccgcgtgcaggcgtatatcaccacgcaaggttcggctggagccgtggtaatgacaccggagaagcgctacgttattccggctgctaaaactcgtcgtgtcgttgatccaactggttgcggcgacgcgtttcgcgccggcctgatctatggtattcagcatgaatatgattggttgaccattggccgcatgggaaacttaatgggtgcggtgaaagtggaacaccctggcacccaaaatcagcgtttcacctttgccgaattcaacgaccggttcaaacaatattttggctacgcgctc

SEQ ID NO: 1868 - protein, 321 aa, synthetic construct
  REGION 1..321: note = variant of adenosine kinase from Xanthemonas campestris
MHHHHHHGGSGMSALICGSLAYDNIMWFPDYFKNHILPDRVHRLNVSFLVFDMRREFGGCAGNIAYNLHLLGGRPIVMATVGQDFGPYREHFETLGIDLSRVKIIDDLSTPQGFITTDMDQNQITAFHSGAMMRSYENHVRDVPGVTLGLVGPDGREGMIQNAEEFAAMGIPFIFDPGQAVPLFSGPELREFIEQADYVVVNDYESRLLQARTGWNEQDIVSRVQAYITTQGSAGAVVMTPEKRYVIPAAKTRRVVDPTGCGDAFRAGLIYGIQHEYDWLTIGRMGNLMGAVKVEHPGTQNQRFTFAEFNDRFKQYFGYAL

SEQ ID NO: 1869 - DNA, 963 bp, synthetic construct
  misc_feature 1..963: note = variant of adenosine kinase from Xanthemonas campestris
  source 1..963: mol_type = other DNA
atgcatcatcaccatcaccatggggggtccggtatgagtgcactcatttgcggttctttagcgtatgataacatcatgtggtttccggactatttcaagaaccatattctgcccgatcgtgttcaccgcctcaatgtcagctttctggtatttgacatgcgtcgtgaatttggaggctgtgccggcaacattgcgtacaatctgcatctgttgggtggtcgcccgatcgtaatggctacggtgggccaagatttcggtccgtatcgcgaacacttcgaaactctgggcattgacttatcccgcgtcaagatcatcgatgatctgagtacaccgcaggggttcattaccaccgacatggatcaaaaccagattacggcgtttcacagcggcgcaatgatgcgttcgtacgaaaatcacgttcgtgatgtgccgggtgttaccttgggcctcgtaggtcctgatggacgcgagggcatgatccaaaatgccgaagaatttgctgctatgggcattccgttcatttttgacccaggtcaggcagtgccttctttcagcggcccggaactgcgcgaatttatcgaacaggcggactatgtggtggtcaacgattacgaaagccgccttcttcaagcccgtactggctggaacgagcaggacattgttagccgcgtgcaggcgtatatcaccacgcaaggttcggctggagccgtggtaatgacaccggagaagcgctacgttattccggctgctaaaactcgtcgtgtcgttgatccaactggttgcggcgacgcgtttcgcgccggcctgatctatggtattcagcatgaatatgattggttgaccattggccgcatgggaaacttaatgggtgcgctgaaagtggaacaccctggcacccaaaatcagcgtttcacctttgccgaattcaacgaccggttcaaacaatattttggctacgcgctc

SEQ ID NO: 1870 - protein, 321 aa, synthetic construct
  REGION 1..321: note = variant of adenosine kinase from Xanthemonas campestris
MHHHHHHGGSGMSALICGSLAYDNIMWFPDYFKNHILPDRVHRLNVSFLVFDMRREFGGCAGNIAYNLHLLGGRPIVMATVGQDFGPYREHFETLGIDLSRVKIIDDLSTPQGFITTDMDQNQITAFHSGAMMRSYENHVRDVPGVTLGLVGPDGREGMIQNAEEFAAMGIPFIFDPGQAVPSFSGPELREFIEQADYVVVNDYESRLLQARTGWNEQDIVSRVQAYITTQGSAGAVVMTPEKRYVIPAAKTRRVVDPTGCGDAFRAGLIYGIQHEYDWLTIGRMGNLMGALKVEHPGTQNQRFTFAEFNDRFKQYFGYAL

SEQ ID NO: 1871 - DNA, 963 bp, synthetic construct
  misc_feature 1..963: note = variant of adenosine kinase from Xanthemonas campestris
  source 1..963: mol_type = other DNA
atgcatcatcaccatcaccatggggggtccggtatgagtgcactcatttgcggttctttagcgtatgataacatcatgtggtttccggactatttcaagaaccatattctgcccgatcgtgttcaccgcctcaatgtcagctttctggtatttgacatgcgtcgtgaatttggaggctgtgccggcaacattgcgtacaatctgcatctgttgggtggtcgcccgatcgtaatggctacggtgggccaagatttcggtccgtatcgcgaacacttcgaaactctgggcattgacttatcccgcgtcaagatcatcgatgatctgagtacaccgcaggggttcattaccaccgacatggatcaaaaccagattacggcgtttcacagcggcgcaatgatgcgttcgtacgaaaatcacgttcgtgatgtgccgggtgttaccttgggcctcgtaggtcctgatggacgcgagggcatgatccaaaatgccgaagaatttgctgctatgggcattccgttcatttttgacccaggtcaggcagtgcctctgttcagcggcccggaactgcgcgaatttatcgaacaggcggactatgtggtggtcaacgattacgaaagccgccttcttcaagcccgtactggctggaacgagcaggacattgttagccgcgtgcaggcgtatatcaccacgcaaggttcggctggagccgtggtaatgacaccggagaagcgctacgttattccggctgctaaaacttctcgtgtcgttgatccaactggttgcggcgacgcgtttcgcgccggcctgatctatggtattcagcatgaatatgattggttgaccattggccgcatgggaaacttaatgggtgcgctgaaagtggaacaccctggcacccaaaatcaggatttcacctttgccgaattcaacgaccggttcaaacaatattttggctacgcgctc

SEQ ID NO: 1872 - protein, 321 aa, synthetic construct
  REGION 1..321: note = variant of adenosine kinase from Xanthemonas campestris
MHHHHHHGGSGMSALICGSLAYDNIMWFPDYFKNHILPDRVHRLNVSFLVFDMRREFGGCAGNIAYNLHLLGGRPIVMATVGQDFGPYREHFETLGIDLSRVKIIDDLSTPQGFITTDMDQNQITAFHSGAMMRSYENHVRDVPGVTLGLVGPDGREGMIQNAEEFAAMGIPFIFDPGQAVPLFSGPELREFIEQADYVVVNDYESRLLQARTGWNEQDIVSRVQAYITTQGSAGAVVMTPEKRYVIPAAKTSRVVDPTGCGDAFRAGLIYGIQHEYDWLTIGRMGNLMGALKVEHPGTQNQDFTFAEFNDRFKQYFGYAL

SEQ ID NO: 1873 - DNA, 963 bp, synthetic construct
  misc_feature 1..963: note = variant of adenosine kinase from Xanthemonas campestris
  source 1..963: mol_type = other DNA
atgcatcatcaccatcaccatggggggtccggtatgagtgcactcatttgcggttctttagcgtatgataacatcatgtggtttccggactatttcaagaaccatattctgcccgatcgtgttcaccgcctcaatgtcagctttctggtatttgacatgcgtcgtgaatttggaggctgtgccggcaacattgcgtacaatctgcatctgttgggtggtcgcccgatcgtaatggctacggtgggccaagatttcggtccgtatcgcgaacacttcgaaactctgggcattgacttatcccgcgtcaagatcatcgatgatgctagtacaccgcaggggttcattaccaccgacatggatcaaaaccagattacggcgtttcacagcggcgcaatgatgcgttcgtacgaaaatcacgttcgtgatgtgccgggtgttaccttgggcctcgtaggtcctgatggacgcgagggcatgatccaaaatgccgaagaatttgctgctatgggcattccgttcatttttgacccaggtcaggcagtgcctctgttcagcggcccggaactgcgcgaatttatcgaacaggcggactatgtggtggtcaacgattacgaaagccgccttcttcaagcccgtactggctggaacgagcaggacattgttagccgcgtgcaggcgtatatcaccacgcaaggttcggctggagccgtggtaatgacaccggagaagcgctacgttattccggctgctaaaacttctcgtgtcgttgatccaactggttgcggcgacgcgtttcgcgccggcctgatctatggtattcagcatgaatatgattggttgaccattggccgcatgggaaacttaatgggtgcgctgaaagtggaacaccctggcacccaaaatcagcgtttcacctttgccgaattcaacgaccggttcaaacaatattttggctacgcgctc

SEQ ID NO: 1874 - protein, 321 aa, synthetic construct
  REGION 1..321: note = variant of adenosine kinase from Xanthemonas campestris
MHHHHHHGGSGMSALICGSLAYDNIMWFPDYFKNHILPDRVHRLNVSFLVFDMRREFGGCAGNIAYNLHLLGGRPIVMATVGQDFGPYREHFETLGIDLSRVKIIDDASTPQGFITTDMDQNQITAFHSGAMMRSYENHVRDVPGVTLGLVGPDGREGMIQNAEEFAAMGIPFIFDPGQAVPLFSGPELREFIEQADYVVVNDYESRLLQARTGWNEQDIVSRVQAYITTQGSAGAVVMTPEKRYVIPAAKTSRVVDPTGCGDAFRAGLIYGIQHEYDWLTIGRMGNLMGALKVEHPGTQNQRFTFAEFNDRFKQYFGYAL

SEQ ID NO: 1875 - DNA, 963 bp, synthetic construct
  misc_feature 1..963: note = variant of adenosine kinase from Xanthemonas campestris
  source 1..963: mol_type = other DNA
atgcatcatcaccatcaccatggggggtccggtatgagtgcactcatttgcggttctttagcgtatgataacatcatgtggtttccggactatttcaagaaccatattctgcccgatcgtgttcaccgcctcaatgtcagctttctggtatttgacatgcgtcgtgaatttggaggctgtgccggcaacattgcgtacaatctgcatctgttgggtggtcgcccgatcgtaatggctacggtgggccaagatttcggtccgtatcgcgaacacttcgaaactctgggcattgacttatcccgcgtcaagatcatcgatgatctgagtacaccgcaggggttcattaccaccgacatggatcaaaaccagattacggcgtttcacagcggcgcaatgatgcgttcgtacgaaaatcacgttcgtgatgtgccgggtgttaccttgggcctcgtaggtcctgatggacgcgagggcatgatccaaaatgccgaagaatttgctgctatgggcattccgttcatttttgacccaggtcaggcagtgcctctgttcagcggcccggaactgcgcgaatttatcgaacaggcggactatgtggtggtcaacgattacgaaagccgccttcttcaagcccgtactggctggaacgagcaggacattgttagccgcgtgcaggcgtatatcaccacgcaaggttcggctggagccgtggtaatgacaccggagaagcgctacgttattccggctgctaaaacttctcgtgtcgttgatccaactggttgcggcgacgcgtttcgcgccggcctgatctatggtattcagcatgaatatgattggttgaccattggccgcatgggaaacttaatgggtgcgctgaaagtggaacaccctggcacccaaaatcagcgtttcacctttgccgaattcaacgaccggttcaaacaatattttggctacgggctc

SEQ ID NO: 1876 - protein, 321 aa, synthetic construct
  REGION 1..321: note = variant of adenosine kinase from Xanthemonas campestris
MHHHHHHGGSGMSALICGSLAYDNIMWFPDYFKNHILPDRVHRLNVSFLVFDMRREFGGCAGNIAYNLHLLGGRPIVMATVGQDFGPYREHFETLGIDLSRVKIIDDLSTPQGFITTDMDQNQITAFHSGAMMRSYENHVRDVPGVTLGLVGPDGREGMIQNAEEFAAMGIPFIFDPGQAVPLFSGPELREFIEQADYVVVNDYESRLLQARTGWNEQDIVSRVQAYITTQGSAGAVVMTPEKRYVIPAAKTSRVVDPTGCGDAFRAGLIYGIQHEYDWLTIGRMGNLMGALKVEHPGTQNQRFTFAEFNDRFKQYFGYGL

SEQ ID NO: 1877 - DNA, 963 bp, synthetic construct
  misc_feature 1..963: note = variant of adenosine kinase from Xanthemonas campestris
  source 1..963: mol_type = other DNA
atgcatcatcaccatcaccatggggggtccggtatgagttctctcatttgcggttctttagcgtatgataacatcatgtggtttccggactatttcaagaaccatattctgcccgatcgtgttcaccgcctcaatgtcagctttctggtatttgacatgcgtcgtgaatttggaggctgtgccggcaacattgcgtacaatctgcatctgttgggtggtcgcccgatcgtaatggctacggtgggccaagatttcggtccgtatcgcgaacacttcgaaactctgggcattgacttatcccgcgtcaagatcatcgatgatctgagtacaccgcaggggttcattaccaccgacatggatcaaaaccagattacggcgtttcacagcggcgcaatgatgcgttcgtacgaaaatcacgttcgtgatgtgccgggtgttaccttgggcctcgtaggtcctgatggacgcgagggcatgatccaaaatgccgaagaatttgctgctatgggcattccgttcatttttgacccaggtcaggcagtgcctctgttcagcggcccggaactgcgcgaatttatcgaacaggcggactatgtggtggtcaacgattacgaaagccgccttcttcaagcccgtactggctggaacgagcaggacattgttagccgcgtgcaggcgtatatcaccacgcaaggttcggctggagccgtggtaatgacaccggagaagcgctacgttattccggctgctaaaacttctcgtgtcgttgatccaactggttgcggcgacgcgtttcgcgccggcctgatctatggtattcagcatgaatatgattggttgaccattggccgcatgggaaacttaatgggtgcgctgaaagtggaacaccctggcacccaaaatcagcgtttcacctttgccgaattcaacgaccggttcaaacaatattttggctacgcgctc

SEQ ID NO: 1878 - protein, 321 aa, synthetic construct
  REGION 1..321: note = variant of adenosine kinase from Xanthemonas campestris
MHHHHHHGGSGMSSLICGSLAYDNIMWFPDYFKNHILPDRVHRLNVSFLVFDMRREFGGCAGNIAYNLHLLGGRPIVMATVGQDFGPYREHFETLGIDLSRVKIIDDLSTPQGFITTDMDQNQITAFHSGAMMRSYENHVRDVPGVTLGLVGPDGREGMIQNAEEFAAMGIPFIFDPGQAVPLFSGPELREFIEQADYVVVNDYESRLLQARTGWNEQDIVSRVQAYITTQGSAGAVVMTPEKRYVIPAAKTSRVVDPTGCGDAFRAGLIYGIQHEYDWLTIGRMGNLMGALKVEHPGTQNQRFTFAEFNDRFKQYFGYAL

SEQ ID NO: 1879 - DNA, 963 bp, synthetic construct
  misc_feature 1..963: note = variant of adenosine kinase from Xanthemonas campestris
  source 1..963: mol_type = other DNA
atgcatcatcaccatcaccatggggggtccggtatgagtgcactcatttgcggttctttagcgtatgataacatcatgtggtttccggactatttcaagaaccatattctgcccgatcgtgttcaccgcctcaatgtcagctttctggtatttgacatgcgtcgtgaatttggaggctgtgccggcaacattgcgtacaatctgcatctgttgggtggtcgcccgatcgtaatggctacggtgggccaagatttcggtccgtatcgcgaacacttcgaaactctgggcattgacttatcccgcgtcaagatcatcgatgatctgagtacaccgcaggggttcattaccaccgacatggatcaaaaccagattacggcgtttcacagcggcgcaatgatgcgttcgtacgaaaatcacgttcgtgatgtgccgggtgttaccttgggcctcgtaggtcctgatggacgcgagggcatgatccaaaatgccgaagaatttgctgctatgggcattccgttcatttttgacccaggtcaggcagtgcctctgttcagcggcccggaactgcgcgaatttatcgaacaggcggactatgtggtggtcaacgattacgaaagccgccttcttcaagcccgtactggctggaacgagcaggacattgttagccgcgtgcaggcgtatatcaccacgcaaggttcggctggagccgtggtaatgacaccggagaagcgctacgttattccggctgctaaaacttctcgtgtcgttgatccaactggttgcggcgacgcgtttcgcgccggcctgatctatggtattcagcatgaatatgattggttgaccattggccgcatgggaaacttaatgggtgcgctgaaagtggaacaccctggcacccaaaatcagcgtttcacctttgccgaattcaacgaccggttcaaacaatattttggctaccggctc

SEQ ID NO: 1880 - protein, 321 aa, synthetic construct
  REGION 1..321: note = variant of adenosine kinase from Xanthemonas campestris
MHHHHHHGGSGMSALICGSLAYDNIMWFPDYFKNHILPDRVHRLNVSFLVFDMRREFGGCAGNIAYNLHLLGGRPIVMATVGQDFGPYREHFETLGIDLSRVKIIDDLSTPQGFITTDMDQNQITAFHSGAMMRSYENHVRDVPGVTLGLVGPDGREGMIQNAEEFAAMGIPFIFDPGQAVPLFSGPELREFIEQADYVVVNDYESRLLQARTGWNEQDIVSRVQAYITTQGSAGAVVMTPEKRYVIPAAKTSRVVDPTGCGDAFRAGLIYGIQHEYDWLTIGRMGNLMGALKVEHPGTQNQRFTFAEFNDRFKQYFGYRL

SEQ ID NO: 1881 - DNA, 963 bp, synthetic construct
  misc_feature 1..963: note = variant of adenosine kinase from Xanthemonas campestris
  source 1..963: mol_type = other DNA
atgcatcatcaccatcaccatggggggtccggtatgagtgcactcatttgcggttctttagcgtatgataacatcatgtggtttccggactatttcaagaaccatattctgcccgatcgtgttcaccgcctcaatattagctttctggtatttgacatgcgtcgtgaatttggaggctgtgccggcaacattgcgtacaatctgcatctgttgggtggtcgcccgatcgtaatggctacggtgggccaagatttcggtccgtatcgcgaacacttcgaaactctgggcattgacttatcccgcgtcaagatcatcgatgatctgagtacaccgcaggggttcattaccaccgacatggatcaaaaccagattacggcgtttcacagcggcgcaatgatgcgttcgtacgaaaatcacgttcgtgatgtgccgggtgttaccttgggcctcgtaggtcctgatggacgcgagggcatgatccaaaatgccgaagaatttgctgctatgggcattccgttcatttttgacccaggtcaggcagtgcctctgttcagcggcccggaactgcgcgaatttatcgaacaggcggactatgtggtggtcaacgattacgaaagccgccttcttcaagcccgtactggctggaacgagcaggacattgttagccgcgtgcaggcgtatatcaccacgcaaggttcggctggagccgtggtaatgacaccggagaagcgctacgttattccggctgctaaaacttctcgtgtcgttgatccaactggttgcggcgacgcgtttcgcgccggcctgatctatggtattcagcatgaatatgattggttgaccattggccgcatgggaaacttaatgggtgcgctgaaagtggaacaccctggcacccaaaatcagcgtttcacctttgccgaattcaacgaccggttcaaacaatattttggctacgcgctc

SEQ ID NO: 1882 - protein, 321 aa, synthetic construct
  REGION 1..321: note = variant of adenosine kinase from Xanthemonas campestris
MHHHHHHGGSGMSALICGSLAYDNIMWFPDYFKNHILPDRVHRLNISFLVFDMRREFGGCAGNIAYNLHLLGGRPIVMATVGQDFGPYREHFETLGIDLSRVKIIDDLSTPQGFITTDMDQNQITAFHSGAMMRSYENHVRDVPGVTLGLVGPDGREGMIQNAEEFAAMGIPFIFDPGQAVPLFSGPELREFIEQADYVVVNDYESRLLQARTGWNEQDIVSRVQAYITTQGSAGAVVMTPEKRYVIPAAKTSRVVDPTGCGDAFRAGLIYGIQHEYDWLTIGRMGNLMGALKVEHPGTQNQRFTFAEFNDRFKQYFGYAL

SEQ ID NO: 1883 - DNA, 963 bp, synthetic construct
  misc_feature 1..963: note = variant of adenosine kinase from Xanthemonas campestris
  source 1..963: mol_type = other DNA
atgcatcatcaccatcaccatggggggtccggtatgagtgcactcatttgcggttctttagcgtatgataacatcatgtggtttccggactatttcaagaaccatattctgcccgatcgtgttcaccgcctcaatgtcagctttctggtatttgacatgcgtcgtgaatttggaggctgtgccggcaacattgcgtacaatctgcatctgttgggtggtcgcccgatcgtaatggctacggtgggccaagatttcggtccgtatcgcgaacacttcgaaactctgggcattgacttatcccgcgtcaagatcatcgatgatctgagtacaccgcaggggttcattaccaccgacatggatcaaaaccagattacggcgtttcacagcggcgcaatgatgcgttcgtacgaaaatcacgttcgtgatgtgccgggtgttaccttgggcctcgtaggtcctgatggacgcgagggcatgatccaaaatgccgaagaatttgctgctatgggcattccgttcatttttgacccaggtcaggcagtgcctctgttcagcggcccggaactgcgcgaatttatcgaacaggcggactatgtggtggtcaacgattacgaaagccgccttcttcaagcccgtactggctggaacgagcaggacattgttagccgcgtgcaggcgtatatcaccacgcaaggttcggctggagccgtggtaatgacaccggagaagcgctacgttattccggctgctaaaacttctcgtgtcgttgatccaactggttgcggcgacgcgtttcgcgccggcctgatctatggtattcagagtgaatatgattggttgaccattggccgcatgggaaacttaatgggtgcgctgaaagtggaacaccctggcacccaaaatcagcgtttcacctttgccgaattcaacgaccggttcaaacaatattttggctacgcgctc

SEQ ID NO: 1884 - protein, 321 aa, synthetic construct
  REGION 1..321: note = variant of adenosine kinase from Xanthemonas campestris
MHHHHHHGGSGMSALICGSLAYDNIMWFPDYFKNHILPDRVHRLNVSFLVFDMRREFGGCAGNIAYNLHLLGGRPIVMATVGQDFGPYREHFETLGIDLSRVKIIDDLSTPQGFITTDMDQNQITAFHSGAMMRSYENHVRDVPGVTLGLVGPDGREGMIQNAEEFAAMGIPFIFDPGQAVPLFSGPELREFIEQADYVVVNDYESRLLQARTGWNEQDIVSRVQAYITTQGSAGAVVMTPEKRYVIPAAKTSRVVDPTGCGDAFRAGLIYGIQSEYDWLTIGRMGNLMGALKVEHPGTQNQRFTFAEFNDRFKQYFGYAL

SEQ ID NO: 1885 - DNA, 963 bp, synthetic construct
  misc_feature 1..963: note = variant of adenosine kinase from Xanthemonas campestris
  source 1..963: mol_type = other DNA
atgcatcatcaccatcaccatggggggtccggtatgagtgcactcatttgcggttctttagcgtatgataacatcatgtggtttccggactatttcaagaaccatattctgcccgatcgtgttcaccgcctcaatgtcagctttctggtatttgacatgcgtcgtgaatttggaggctgtgccggcaacattgcgtacaatctgcatctgttgggtggtcgcccgatcgtaatggctacggtgggccaagatttcggtccgtatcgcgaacacttcgaaactctgggcattgacttatcccgcgtcaagatcatcgatgatctgagtacaccgcaggggttcattaccaccgacatggatcaaaaccagattacggcgtttcacagcggcgcaatgatgcgttcgtacgaaaatcacgttcgtgatgtgccgggtgttaccttgggcctcgtaggtcctgatggacgcgagggcatgatccaaaatgccgaagaatttgctgctatgggcattccgttcatttttgacccaggtcaggcagtgcctctgttcagcggcccggaactgcgcgaatttatcgaacaggcggactatgtggtggtcaacgattacgaaagccgccttcttcaagcccgtactggctggaacgagcaggacattgttagccgcgtgcaggcgtatatcaccacgcaaggttcggctggagccgtggtaatgacaccggagtttcgctacgttattccggctgctaaaacttctcgtgtcgttgatccaactggttgcggcgacgcgtttcgcgccggcctgatctatggtattcagcatgaatatgattggttgaccattggccgcatgggaaacttaatgggtgcgctgaaagtggaacaccctggcacccaaaatcagcgtttcacctttgccgaattcaacgaccggttcaaacaatattttggctacgcgctc

SEQ ID NO: 1886 - protein, 321 aa, synthetic construct
  REGION 1..321: note = variant of adenosine kinase from Xanthemonas campestris
MHHHHHHGGSGMSALICGSLAYDNIMWFPDYFKNHILPDRVHRLNVSFLVFDMRREFGGCAGNIAYNLHLLGGRPIVMATVGQDFGPYREHFETLGIDLSRVKIIDDLSTPQGFITTDMDQNQITAFHSGAMMRSYENHVRDVPGVTLGLVGPDGREGMIQNAEEFAAMGIPFIFDPGQAVPLFSGPELREFIEQADYVVVNDYESRLLQARTGWNEQDIVSRVQAYITTQGSAGAVVMTPEFRYVIPAAKTSRVVDPTGCGDAFRAGLIYGIQHEYDWLTIGRMGNLMGALKVEHPGTQNQRFTFAEFNDRFKQYFGYAL

SEQ ID NO: 1887 - DNA, 963 bp, synthetic construct
  misc_feature 1..963: note = variant of adenosine kinase from Xanthemonas campestris
  source 1..963: mol_type = other DNA
atgcatcatcaccatcaccatggggggtccggtatgagtacgctcatttgcggttctttagcgtatgataacatcatgtggtttccggactatttcaagaaccatattctgcccgatcgtgttcaccgcctcaatgtcagctttctggtatttgacatgcgtcgtgaatttggaggctgtgccggcaacattgcgtacaatctgcatctgttgggtggtcgcccgatcgtaatggctacggtgggccaagatttcggtccgtatcgcgaacacttcgaaactctgggcattgacttatcccgcgtcaagatcatcgatgatctgagtacaccgcaggggttcattaccaccgacatggatcaaaaccagattacggcgtttcacagcggcgcaatgatgcgttcgtacgaaaatcacgttcgtgatgtgccgggtgttaccttgggcctcgtaggtcctgatggacgcgagggcatgatccaaaatgccgaagaatttgctgctatgggcattccgttcatttttgacccaggtcaggcagtgcctctgttcagcggcccggaactgcgcgaatttatcgaacaggcggactatgtggtggtcaacgattacgaaagccgccttcttcaagcccgtactggctggaacgagcaggacattgttagccgcgtgcaggcgtatatcaccacgcaaggttcggctggagccgtggtaatgacaccggagaagcgctacgttattccggctgctaaaacttctcgtgtcgttgatccaactggttgcggcgacgcgtttcgcgccggcctgatctatggtattcagcatgaatatgattggttgaccattggccgcatgggaaacttaatgggtgcgctgaaagtggaacaccctggcacccaaaatcagcgtttcacctttgccgaattcaacgaccggttcaaacaatattttggctacgcgctc

SEQ ID NO: 1888 - protein, 321 aa, synthetic construct
  REGION 1..321: note = variant of adenosine kinase from Xanthemonas campestris
MHHHHHHGGSGMSTLICGSLAYDNIMWFPDYFKNHILPDRVHRLNVSFLVFDMRREFGGCAGNIAYNLHLLGGRPIVMATVGQDFGPYREHFETLGIDLSRVKIIDDLSTPQGFITTDMDQNQITAFHSGAMMRSYENHVRDVPGVTLGLVGPDGREGMIQNAEEFAAMGIPFIFDPGQAVPLFSGPELREFIEQADYVVVNDYESRLLQARTGWNEQDIVSRVQAYITTQGSAGAVVMTPEKRYVIPAAKTSRVVDPTGCGDAFRAGLIYGIQHEYDWLTIGRMGNLMGALKVEHPGTQNQRFTFAEFNDRFKQYFGYAL

SEQ ID NO: 1889 - DNA, 963 bp, synthetic construct
  misc_feature 1..963: note = variant of adenosine kinase from Xanthemonas campestris
  source 1..963: mol_type = other DNA
atgcatcatcaccatcaccatggggggtccggtatgagtgcactcatttgcggttctttagcgtatgataacatcatgtggtttccggactatttcaagaaccatattctgcccgatcgtgttcaccgcctcaatgtcagctttctggtatttgacatgcgtcgtgaatttggaggctgtgccggcaacattgcgtacaatctgcatctgttgggtggtcgcccgatcgtaatggctacggtgggccaagatttcggtccgtatcgcgaacacttcgaaactctgggcattgacttatcccgcgtcaagatcatcgatgatctgagtacaccgcaggggttcattaccaccgacatggatcaaaaccagattacggcgtttcacagcggcgcaatgatgcgttcgtacgaaaatcacgttcgtgatgtgccgggtgttaccttgggcctcgtaggtcctgatggacgcgagggcatgatccaaaatgccgaagaatttgctgctatgggcattccgttcatttttgacccaggtcaggcagtgcctctgttcagcggcccggaactgcgcgaatttatcgaacaggcggactatgtggtggtcaacgattacgaaagccgccttcttcaagcccgtactggctggaacgagcaggacattgttagccgcgtgcaggcgtatatcaccacgcaaggttcggctggagccgtggtaatgacaccggagaagcgctacgttattccggctgctaaaacttctcgtgtcgttgatccaactggttgcggcgacgcgtttcgcgccggcctgatctatggtattcagcatgaatatgattggttgaccattggccgcatgggaaacttaatgggtgcgctgaaagtggaacaccctggcacccaaaatcagcgtttcacctttgccgaattcaacgagcggttcaaacaatattttggctacgcgctc

SEQ ID NO: 1890 - protein, 321 aa, synthetic construct
  REGION 1..321: note = variant of adenosine kinase from Xanthemonas campestris
MHHHHHHGGSGMSALICGSLAYDNIMWFPDYFKNHILPDRVHRLNVSFLVFDMRREFGGCAGNIAYNLHLLGGRPIVMATVGQDFGPYREHFETLGIDLSRVKIIDDLSTPQGFITTDMDQNQITAFHSGAMMRSYENHVRDVPGVTLGLVGPDGREGMIQNAEEFAAMGIPFIFDPGQAVPLFSGPELREFIEQADYVVVNDYESRLLQARTGWNEQDIVSRVQAYITTQGSAGAVVMTPEKRYVIPAAKTSRVVDPTGCGDAFRAGLIYGIQHEYDWLTIGRMGNLMGALKVEHPGTQNQRFTFAEFNERFKQYFGYAL

SEQ ID NO: 1891 - DNA, 963 bp, synthetic construct
  misc_feature 1..963: note = variant of adenosine kinase from Xanthemonas campestris
  source 1..963: mol_type = other DNA
atgcatcatcaccatcaccatggggggtccggtatgagtgcactcatttgcggttctttagcgtatgataacatcatgtggtttccggactatttcaagaaccatattctgcccgatcgtgttcaccgcctcaatgtcagctttctggtatttgacatgcgtcgtgaatttggaggctgtgccggcaacattgcgtacaatctgcatctgttgggtggtcgcccgatcgtaatggctacggtgggccaagatttcggtccgtatcgcgaacacttcgaaactctgggcattgacttatcccgcgtcaagatcatcgatgatctgagtacaccgcaggggttcattaccaccgacatggatcaaaaccagattacggcgtttcacagcggcgcaatgatgcgttcgtacgaaaatcacgttcgtgatgtgccgggtgttaccttgggcctcgtaggtcctgatggacgcgagggcatgatccaaaatgccgaagaatttgctgctatgggcattccgttcatttttgacccaggtcaggcagtgcctctgttcagcggcccggaactgcgcgaatttatcgaacaggcggactatgtggtggtcaacgattacgaaagccgccttcttcaacgtcgtactggctggaacgagcaggacattgttagccgcgtgcaggcgtatatcaccacgcaaggttcggctggagccgtggtaatgacaccggagaagcgctacgttattccggctgctaaaacttctcgtgtcgttgatccaactggttgcggcgacgcgtttcgcgccggcctgatctatggtattcagcatgaatatgattggttgaccattggccgcatgggaaacttaatgggtgcgctgaaagtggaacaccctggcacccaaaatcagcgtttcacctttgccgaattcaacgaccggttcaaacaatattttggctacgcgctc

SEQ ID NO: 1892 - protein, 321 aa, synthetic construct
  REGION 1..321: note = variant of adenosine kinase from Xanthemonas campestris
MHHHHHHGGSGMSALICGSLAYDNIMWFPDYFKNHILPDRVHRLNVSFLVFDMRREFGGCAGNIAYNLHLLGGRPIVMATVGQDFGPYREHFETLGIDLSRVKIIDDLSTPQGFITTDMDQNQITAFHSGAMMRSYENHVRDVPGVTLGLVGPDGREGMIQNAEEFAAMGIPFIFDPGQAVPLFSGPELREFIEQADYVVVNDYESRLLQRRTGWNEQDIVSRVQAYITTQGSAGAVVMTPEKRYVIPAAKTSRVVDPTGCGDAFRAGLIYGIQHEYDWLTIGRMGNLMGALKVEHPGTQNQRFTFAEFNDRFKQYFGYAL

SEQ ID NO: 1893 - DNA, 963 bp, synthetic construct
  misc_feature 1..963: note = variant of adenosine kinase from Xanthemonas campestris
  source 1..963: mol_type = other DNA
atgcatcatcaccatcaccatggggggtccggtatgagtgcactcatttgcggttctttagcgtatgataacatcatgtggtttccggactatttcaagaaccatattctgcgggatcgtgttcaccgcctcaatgtcagctttctggtatttgacatgcgtcgtgaatttggaggctgtgccggcaacattgcgtacaatctgcatctgttgggtggtcgcccgatcgtaatggctacggtgggccaagatttcggtccgtatcgcgaacacttcgaaactctgggcattgacttatcccgcgtcaagatcatcgatgatctgagtacaccgcaggggttcattaccaccgacatggatcaaaaccagattacggcgtttcacagcggcgcaatgatgcgttcgtacgaaaatcacgttcgtgatgtgccgggtgttaccttgggcctcgtaggtcctgatggacgcgagggcatgatccaaaatgccgaagaatttgctgctatgggcattccgttcatttttgacccaggtcaggcagtgcctctgttcagcggcccggaactgcgcgaatttatcgaacaggcggactatgtggtggtcaacgattacgaaagccgccttcttcaagcccgtactggctggaacgagcaggacattgttagccgcgtgcaggcgtatatcaccacgcaaggttcggctggagccgtggtaatgacaccggagaagcgctacgttattccggctgctaaaacttctcgtgtcgttgatccaactggttgcggcgacgcgtttcgcgccggcctgatctatggtattcagcatgaatatgattggttgaccattggccgcatgggaaacttaatgggtgcgctgaaagtggaacaccctggcacccaaaatcagcgtttcacctttgccgaattcaacgaccggttcaaacaatattttggctacgcgctc

SEQ ID NO: 1894 - protein, 321 aa, synthetic construct
  REGION 1..321: note = variant of adenosine kinase from Xanthemonas campestris
MHHHHHHGGSGMSALICGSLAYDNIMWFPDYFKNHILRDRVHRLNVSFLVFDMRREFGGCAGNIAYNLHLLGGRPIVMATVGQDFGPYREHFETLGIDLSRVKIIDDLSTPQGFITTDMDQNQITAFHSGAMMRSYENHVRDVPGVTLGLVGPDGREGMIQNAEEFAAMGIPFIFDPGQAVPLFSGPELREFIEQADYVVVNDYESRLLQARTGWNEQDIVSRVQAYITTQGSAGAVVMTPEKRYVIPAAKTSRVVDPTGCGDAFRAGLIYGIQHEYDWLTIGRMGNLMGALKVEHPGTQNQRFTFAEFNDRFKQYFGYAL

SEQ ID NO: 1895 - DNA, 963 bp, synthetic construct
  misc_feature 1..963: note = variant of adenosine kinase from Xanthemonas campestris
  source 1..963: mol_type = other DNA
atgcatcatcaccatcaccatggggggtccggtatgagtgcactcatttgcggttctttagcgtatgataacatcatgtggtttccggactatttcaagaaccatattctgcccgatcgtgttcaccgcctcaatgtcagctttctggtatttgacatgcgtcgtgaatttggaggctgtgccggcaacattgcgtacaatctgcatctgttgggtggtcgcccgatcgtaatggctacggtgggccaagatttcggtccgtatcgcgaacacttcgaaactctgggcattgacttatcccgcgtcaagatcatcgatgatctgagtacaccgcaggggttcattaccaccgacatggatcaaaaccagattacggcgtttcacagcggcgcaatgatgcgttcgtacgaaaatcacgttcgtgatgtgccgggttgtaccttgggcctcgtaggtcctgatggacgcgagggcatgatccaaaatgccgaagaatttgctgctatgggcattccgttcatttttgacccaggtcaggcagtgcctctgttcagcggcccggaactgcgcgaatttatcgaacaggcggactatgtggtggtcaacgattacgaaagccgccttcttcaagcccgtactggctggaacgagcaggacattgttagccgcgtgcaggcgtatatcaccacgcaaggttcggctggagccgtggtaatgacaccggagaagcgctacgttattccggctgctaaaacttctcgtgtcgttgatccaactggttgcggcgacgcgtttcgcgccggcctgatctatggtattcagcatgaatatgattggttgaccattggccgcatgggaaacttaatgggtgcgctgaaagtggaacaccctggcacccaaaatcagcgtttcacctttgccgaattcaacgaccggttcaaacaatattttggctacgcgctc

SEQ ID NO: 1896 - protein, 321 aa, synthetic construct
  REGION 1..321: note = variant of adenosine kinase from Xanthemonas campestris
MHHHHHHGGSGMSALICGSLAYDNIMWFPDYFKNHILPDRVHRLNVSFLVFDMRREFGGCAGNIAYNLHLLGGRPIVMATVGQDFGPYREHFETLGIDLSRVKIIDDLSTPQGFITTDMDQNQITAFHSGAMMRSYENHVRDVPGCTLGLVGPDGREGMIQNAEEFAAMGIPFIFDPGQAVPLFSGPELREFIEQADYVVVNDYESRLLQARTGWNEQDIVSRVQAYITTQGSAGAVVMTPEKRYVIPAAKTSRVVDPTGCGDAFRAGLIYGIQHEYDWLTIGRMGNLMGALKVEHPGTQNQRFTFAEFNDRFKQYFGYAL

SEQ ID NO: 1897 - DNA, 963 bp, synthetic construct
  misc_feature 1..963: note = variant of adenosine kinase from Xanthemonas campestris
  source 1..963: mol_type = other DNA
atgcatcatcaccatcaccatggggggtccggtatgagtgcactcatttgcggttctttagcgtatgataacatcatgtggtttccggactatttcaagaaccatattctgcccgatcgtgttcaccgcctcaatgtcagctttctggtatttgacatgcgtcgtgaatttggaggctgtgccggcaacattgcgtacaatctgcatctgttgggtggtcgcccgatcgtaatggctacggtgggccaagatttcggtccgtatcgcgaacacttcgaaactctgggcattgacttatcccgcgtcaagatcatcgatgatctgagtacaccgcaggggttcattaccaccgacatggatcaaaaccagattacggcgtttcacagcggcgcaatgatgcgttcgtacgaaaatcacgttcgtgatgtgccgggtgttaccttgggcctcgtaggtcctgatggacgcgagggcatgatccaaaatgccgaagaatttgctgctatgggcattccgttcatttttgacccaggtcaggcagtgcctctgttcagcggcccggaactgcgcgaatttatcgaacaggcggactatgtggtggtcaacgattacgaaagccgccttcttcaagcccgtactggctggaacgagcaggacattgttagccgcgtgcaggcgtatatcaccacgcaaggttcggctggagccgtggtaatgacaccggagaagcgctacgttattccggctgctaaaacttctcgtgtcgttgatccaactggttgcggcgacgcgtttcgcgccggcctgatctatggtattcagcatgaatatgattggttgaccattggccgcatgggaaacttaatgggtgcgctgaaagtggaacaccctggcacccaaaatcagtctttcacctttgccgaattcaacgaccggttcaaacaatattttggctacgcgctc

SEQ ID NO: 1898 - protein, 321 aa, synthetic construct
  REGION 1..321: note = variant of adenosine kinase from Xanthemonas campestris
MHHHHHHGGSGMSALICGSLAYDNIMWFPDYFKNHILPDRVHRLNVSFLVFDMRREFGGCAGNIAYNLHLLGGRPIVMATVGQDFGPYREHFETLGIDLSRVKIIDDLSTPQGFITTDMDQNQITAFHSGAMMRSYENHVRDVPGVTLGLVGPDGREGMIQNAEEFAAMGIPFIFDPGQAVPLFSGPELREFIEQADYVVVNDYESRLLQARTGWNEQDIVSRVQAYITTQGSAGAVVMTPEKRYVIPAAKTSRVVDPTGCGDAFRAGLIYGIQHEYDWLTIGRMGNLMGALKVEHPGTQNQSFTFAEFNDRFKQYFGYAL

SEQ ID NO: 1899 - DNA, 963 bp, synthetic construct
  misc_feature 1..963: note = variant of adenosine kinase from Xanthemonas campestris
  source 1..963: mol_type = other DNA
atgcatcatcaccatcaccatggggggtccggtatgagtgcactcatttgcggttctttagcgtatgataacatcatgtggtttccggactatttcaagaaccatattctgcccgatcgtgttcaccgcctcaatgtcagctttctggtatttgacatgcgtcgtgaatttggaggctgtgccggcaacattgcgtacaatctgcatctgttgggtggtcgcccgatcgtaatggctacggtgggccaagatttcggtccgtatcgcgaacacttcgaaactctgggcattgacttatcccgcgtcaagatcatcgatgatctgagtacaccgcaggggttcattaccaccgacatggatcaaaaccagattacggcgtttcacagcggcgcaatgatgcgttcgtacgaaaatcacgttcgtgatgtgccgggtgttaccttgggcctcgtaggtcctgatggacgcgagggcatgatccaaaatgccgaagaatttgctgctatgggcattccgttcatttttgacccaggtcaggcagtgcctctgttcagcggcccggaactgcgcgaatttatcgaacaggcggactatgtggtggtcaacgattacgaaagccgccttcttcaagcccgtactggctggaacgagcaggacattgttagccgcgtgcaggcgtatatcaccacgcaaggttcggctggagccgtggtaatgacaccggagaagcgctacgttattccggctgctaaaacttctcgtgtcgttgatccaactggttgcggcgacgcgtttcgcgccggcctgatctatggtattcagcatgaatatgattggttgaccattggccgcatgggaaacttaatgggtgcgctgaaagtggaacaccctggcacccaaaatcagcgtttcacctttgccgaattcaacgaccggttcaaatcttattttggctacgcgctc

SEQ ID NO: 1900 - protein, 321 aa, synthetic construct
  REGION 1..321: note = variant of adenosine kinase from Xanthemonas campestris
MHHHHHHGGSGMSALICGSLAYDNIMWFPDYFKNHILPDRVHRLNVSFLVFDMRREFGGCAGNIAYNLHLLGGRPIVMATVGQDFGPYREHFETLGIDLSRVKIIDDLSTPQGFITTDMDQNQITAFHSGAMMRSYENHVRDVPGVTLGLVGPDGREGMIQNAEEFAAMGIPFIFDPGQAVPLFSGPELREFIEQADYVVVNDYESRLLQARTGWNEQDIVSRVQAYITTQGSAGAVVMTPEKRYVIPAAKTSRVVDPTGCGDAFRAGLIYGIQHEYDWLTIGRMGNLMGALKVEHPGTQNQRFTFAEFNDRFKSYFGYAL

SEQ ID NO: 1901 - DNA, 963 bp, synthetic construct
  misc_feature 1..963: note = variant of adenosine kinase from Xanthemonas campestris
  source 1..963: mol_type = other DNA
atgcatcatcaccatcaccatggggggtccggtatgagtgcactcatttgcggttctttagcgtatgataacatcatgtggtttccggactatttcaagaaccatattctgcccgatcgtgttcaccgcctcaatgtcagctttctggtatttgacatgcgtcgtgaatttggaggctgtgccggcaacattgcgtacaatctgcatctgttgggtggtcgcccgatcgtaatggctacggtgggccaagatttcggtccgtatcgcgaacacttcgaaactctgggcattgacttatcccgcgtcaagatcatcgatgatctgagtacaccgcaggggttcattaccaccgacatggatcaaaaccagattacggcgtttcacagcggcgcaatgatgcgttcgtacgaaaatcacgttcgtgatgtgccgggtgttaccttgggcctcgtaggtcctgatggacgcgagggcatgatccaaaatgccgaagaatttgctgctatgggcattccgttcatttttgacccaggtcaggcagtgcctctgttcagcggcccggaactgcgcgaatttatcgaacaggcggactatgtggtggtcaacgattacgaaagccgccttcttcaagcccgtactggctggaacgagcaggacattgttagccgcgtgcaggcgtatatcaccacgcaaggttcggctggagccgtggtaatgacaccggagaagcgctacgttattccggctgctaaaacttctcgtgtcgttgatccaactggttgcggcgacgcgtttcgcgccggcctgatctatggtattcagcatgaatatgattggttgaccattggccgcatgggaaacttaatgggtgcgctgaaagtggaacaccctggcacccaaaatcaggtgttcacctttgccgaattcaacgaccggttcaaacaatattttggctacgcgctc

SEQ ID NO: 1902 - protein, 321 aa, synthetic construct
  REGION 1..321: note = variant of adenosine kinase from Xanthemonas campestris
MHHHHHHGGSGMSALICGSLAYDNIMWFPDYFKNHILPDRVHRLNVSFLVFDMRREFGGCAGNIAYNLHLLGGRPIVMATVGQDFGPYREHFETLGIDLSRVKIIDDLSTPQGFITTDMDQNQITAFHSGAMMRSYENHVRDVPGVTLGLVGPDGREGMIQNAEEFAAMGIPFIFDPGQAVPLFSGPELREFIEQADYVVVNDYESRLLQARTGWNEQDIVSRVQAYITTQGSAGAVVMTPEKRYVIPAAKTSRVVDPTGCGDAFRAGLIYGIQHEYDWLTIGRMGNLMGALKVEHPGTQNQVFTFAEFNDRFKQYFGYAL

SEQ ID NO: 1903 - DNA, 963 bp, synthetic construct
  misc_feature 1..963: note = variant of adenosine kinase from Xanthemonas campestris
  source 1..963: mol_type = other DNA
atgcatcatcaccatcaccatggggggtccggtatgagtgcactcatttgcggttctttagcgtatgataacatcatgtggtttccggactatttcaagaaccatattctgcccgatcgtgttcaccgcctcaatgtcagctttctggtatttgacatgcgtcgtgaatttggaggctgtgccggcaacattgcgtacaatctgcatctgttgggtggtcgcccgatcgtaatggctacggtgggccaagatttcggtccgtatcgcgaacacttcgaaactctgggcattgacttatcccgcgtcaagatcatcgatgatgagagtacaccgcaggggttcattaccaccgacatggatcaaaaccagattacggcgtttcacagcggcgcaatgatgcgttcgtacgaaaatcacgttcgtgatgtgccgggtgttaccttgggcctcgtaggtcctgatggacgcgagggcatgatccaaaatgccgaagaatttgctgctatgggcattccgttcatttttgacccaggtcaggcagtgcctctgttcagcggcccggaactgcgcgaatttatcgaacaggcggactatgtggtggtcaacgattacgaaagccgccttcttcaagcccgtactggctggaacgagcaggacattgttagccgcgtgcaggcgtatatcaccacgcaaggttcggctggagccgtggtaatgacaccggagaagcgctacgttattccggctgctaaaacttctcgtgtcgttgatccaactggttgcggcgacgcgtttcgcgccggcctgatctatggtattcagcatgaatatgattggttgaccattggccgcatgggaaacttaatgggtgcgctgaaagtggaacaccctggcacccaaaatcagcgtttcacctttgccgaattcaacgaccggttcaaacaatattttggctacgcgctc

SEQ ID NO: 1904 - protein, 321 aa, synthetic construct
  REGION 1..321: note = variant of adenosine kinase from Xanthemonas campestris
MHHHHHHGGSGMSALICGSLAYDNIMWFPDYFKNHILPDRVHRLNVSFLVFDMRREFGGCAGNIAYNLHLLGGRPIVMATVGQDFGPYREHFETLGIDLSRVKIIDDESTPQGFITTDMDQNQITAFHSGAMMRSYENHVRDVPGVTLGLVGPDGREGMIQNAEEFAAMGIPFIFDPGQAVPLFSGPELREFIEQADYVVVNDYESRLLQARTGWNEQDIVSRVQAYITTQGSAGAVVMTPEKRYVIPAAKTSRVVDPTGCGDAFRAGLIYGIQHEYDWLTIGRMGNLMGALKVEHPGTQNQRFTFAEFNDRFKQYFGYAL

SEQ ID NO: 1905 - DNA, 963 bp, synthetic construct
  misc_feature 1..963: note = variant of adenosine kinase from Xanthemonas campestris
  source 1..963: mol_type = other DNA
atgcatcatcaccatcaccatggggggtccggtatgagtgcactcatttgcggttctttagcgtatgataacatcatgtggtttccggactatttcaagaaccatattctgcccgatcgtgttcaccgcctcaatgtcagctttctggtatttgacatgcgtcgtgaatttggaggctgtgccggcaacattgcgtacaatctgcatctgttgggtggtcgcccgatcgtaatggctacggtgggccaagatttcggtccgtatcgcgaacacttcgaaatgctgggcattgacttatcccgcgtcaagatcatcgatgatctgagtacaccgcaggggttcattaccaccgacatggatcaaaaccagattacggcgtttcacagcggcgcaatgatgcgttcgtacgaaaatcacgttcgtgatgtgccgggtgttaccttgggcctcgtaggtcctgatggacgcgagggcatgatccaaaatgccgaagaatttgctgctatgggcattccgttcatttttgacccaggtcaggcagtgcctctgttcagcggcccggaactgcgcgaatttatcgaacaggcggactatgtggtggtcaacgattacgaaagccgccttcttcaagcccgtactggctggaacgagcaggacattgttagccgcgtgcaggcgtatatcaccacgcaaggttcggctggagccgtggtaatgacaccggagaagcgctacgttattccggctgctaaaacttctcgtgtcgttgatccaactggttgcggcgacgcgtttcgcgccggcctgatctatggtattcagcatgaatatgattggttgaccattggccgcatgggaaacttaatgggtgcgctgaaagtggaacaccctggcacccaaaatcagcgtttcacctttgccgaattcaacgaccggttcaaacaatattttggctacgcgctc

SEQ ID NO: 1906 - protein, 321 aa, synthetic construct
  REGION 1..321: note = variant of adenosine kinase from Xanthemonas campestris
MHHHHHHGGSGMSALICGSLAYDNIMWFPDYFKNHILPDRVHRLNVSFLVFDMRREFGGCAGNIAYNLHLLGGRPIVMATVGQDFGPYREHFEMLGIDLSRVKIIDDLSTPQGFITTDMDQNQITAFHSGAMMRSYENHVRDVPGVTLGLVGPDGREGMIQNAEEFAAMGIPFIFDPGQAVPLFSGPELREFIEQADYVVVNDYESRLLQARTGWNEQDIVSRVQAYITTQGSAGAVVMTPEKRYVIPAAKTSRVVDPTGCGDAFRAGLIYGIQHEYDWLTIGRMGNLMGALKVEHPGTQNQRFTFAEFNDRFKQYFGYAL

SEQ ID NO: 1907 - DNA, 963 bp, synthetic construct
  misc_feature 1..963: note = variant of adenosine kinase from Xanthemonas campestris
  source 1..963: mol_type = other DNA
atgcatcatcaccatcaccatggggggtccggtatgagtgcactcatttgcggttctttagcgtatgataacatcatgtggtttccggactatttcaagaaccatattctgcccgatcgtgttcaccgcctcaatgtcagctttctggtatttgacatgcgtcgtgaatttggaggctgtgccggcaacattgcgtacaatctgcatctgttgggtggtcgcccgatcgtaatggctacggtgggccaagatttcggtccgtatcgcgaacacttcgaaactctgggcattgacttatcccgcgtcaagatcatcgatgatctgagtacaccgcaggggttcattaccaccgacatggatcaaaaccagattacggcgtttcacagcggcgcaatgatgcgttcgtacgaaaatcacgttcgtgatgtgccgggtgttaccttgggcctcgtaggtcctgatggacgcgagggcatgatccaaaatgccgaagaatttgctgctatgggcattccgttcatttttgacccaggtcaggcagtgcctctgttcagcggcccggaactgcgcgaatttatcaggcaggcggactatgtggtggtcaacgattacgaaagccgccttcttcaagcccgtactggctggaacgagcaggacattgttagccgcgtgcaggcgtatatcaccacgcaaggttcggctggagccgtggtaatgacaccggagaagcgctacgttattccggctgctaaaacttctcgtgtcgttgatccaactggttgcggcgacgcgtttcgcgccggcctgatctatggtattcagcatgaatatgattggttgaccattggccgcatgggaaacttaatgggtgcgctgaaagtggaacaccctggcacccaaaatcagcgtttcacctttgccgaattcaacgaccggttcaaacaatattttggctacgcgctc

SEQ ID NO: 1908 - protein, 321 aa, synthetic construct
  REGION 1..321: note = variant of adenosine kinase from Xanthemonas campestris
MHHHHHHGGSGMSALICGSLAYDNIMWFPDYFKNHILPDRVHRLNVSFLVFDMRREFGGCAGNIAYNLHLLGGRPIVMATVGQDFGPYREHFETLGIDLSRVKIIDDLSTPQGFITTDMDQNQITAFHSGAMMRSYENHVRDVPGVTLGLVGPDGREGMIQNAEEFAAMGIPFIFDPGQAVPLFSGPELREFIRQADYVVVNDYESRLLQARTGWNEQDIVSRVQAYITTQGSAGAVVMTPEKRYVIPAAKTSRVVDPTGCGDAFRAGLIYGIQHEYDWLTIGRMGNLMGALKVEHPGTQNQRFTFAEFNDRFKQYFGYAL

SEQ ID NO: 1909 - DNA, 963 bp, synthetic construct
  misc_feature 1..963: note = variant of adenosine kinase from Xanthemonas campestris
  source 1..963: mol_type = other DNA
atgcatcatcaccatcaccatggggggtccggtatgagtgcactcatttgcggttctttagcgtatgataacatcatgtggtttccggactatttcaagaaccatattctgcccgatcgtgttcaccgcctcaatgtcagctttctggtatttgacatgcgtcgtgaatttggaggctgtgccggcaacattgcgtacaatctgcatctgttgggtggtcgcccgatcgtaatggctacggtgggccaagatttcggtccgtatcgcgaacacttcgaaactctgggcattgacttatcccgcgtcaagatcatcgatgatctgagtacaccgcaggggttcattaccaccgacatggatcaaaaccagattacggcgtttcacagcggcgcaatgatgcgttcgtacgaaaatcacgttcgtgatgtgccgggtgttaccttgggcctcgtaggtcctgatggacgcgagggcatgatccaaaatgccgaagaatttgctgctatgggcattccgttcatttttgacccaggtcaggcagtgcctctgttcagcggcccggaactgcgcgaatttatcgaacaggcggactatgtggtggtcaacgattacgaaagccgccttcttcaagcccgtactggctggaacgagcaggacattgttagccgcgtgcaggcgtatatcaccacgcaaggttcggctggagccgtggtaatgacaccggagaagcgctacgttattccggctgctaaaacttctcgtgtcgttgatccaactggttgcggcgacgcgtttcgcgccggcctgatctatggtattcggcatgaatatgattggttgaccattggccgcatgggaaacttaatgggtgcgctgaaagtggaacaccctggcacccaaaatcagcgtttcacctttgccgaattcaacgaccggttcaaacaatattttggctacgcgctc

SEQ ID NO: 1910 - protein, 321 aa, synthetic construct
  REGION 1..321: note = variant of adenosine kinase from Xanthemonas campestris
MHHHHHHGGSGMSALICGSLAYDNIMWFPDYFKNHILPDRVHRLNVSFLVFDMRREFGGCAGNIAYNLHLLGGRPIVMATVGQDFGPYREHFETLGIDLSRVKIIDDLSTPQGFITTDMDQNQITAFHSGAMMRSYENHVRDVPGVTLGLVGPDGREGMIQNAEEFAAMGIPFIFDPGQAVPLFSGPELREFIEQADYVVVNDYESRLLQARTGWNEQDIVSRVQAYITTQGSAGAVVMTPEKRYVIPAAKTSRVVDPTGCGDAFRAGLIYGIRHEYDWLTIGRMGNLMGALKVEHPGTQNQRFTFAEFNDRFKQYFGYAL

SEQ ID NO: 1911 - DNA, 963 bp, synthetic construct
  misc_feature 1..963: note = variant of adenosine kinase from Xanthemonas campestris
  source 1..963: mol_type = other DNA
atgcatcatcaccatcaccatggggggtccggtatgagtgcactcatttgcggttctttagcgtatgataacatcatgtggtttccggactatttcaagaaccatattctgcccgatcgtgttcaccgcctcaatgtcagctttctggtatttgacatgcgtcgtgaatttggaggctgtgccggcaacattgcgtacaatctgcatctgttgggtggtcgcccgatcgtaatggctacggtgggccaagatttcggtccgtatcgcgaacacttcgaaactctgggcattgacttatcccgcgtcaagatcatcgatgatctgagtacaccgcaggggttcattaccaccgacatggatcaaaaccagattacggcgtttcacagcggcgcaatgatgcgttcgtacgaaaatcacgttcgtgatgtgccgggtgttaccttgggcctcgtaggtcctgatggacgcgagggcatgatccaaaatgccgaagaatttgctgctatgggcattccgttcatttttgacccaggtcaggcagtgcctctgttcagcggcccggaactgcgcgaatttatcgaacaggcggactatgtggtggtcaacgattacgaaagccgccttcttcaagcccgtactggctggaacgagcaggacattgttagccgcgtgcaggcgtatatcaccacgcaaggttcggctggagccgtggtaatgacaccggagaagcgctacgttattccggctgctaaaacttctcgtgtcgttgatccaactggttgcggcgacgcgtttcgcgccggcctgatctatggtattcagcatgaatatgattggttgaccattggccgcatgggaaacttaatgggtgcgctgaaagtggaacaccctggcacccaaaatcagcgtttcacctttggggaattcaacgaccggttcaaacaatattttggctacgcgctc

SEQ ID NO: 1912 - protein, 321 aa, synthetic construct
  REGION 1..321: note = variant of adenosine kinase from Xanthemonas campestris
MHHHHHHGGSGMSALICGSLAYDNIMWFPDYFKNHILPDRVHRLNVSFLVFDMRREFGGCAGNIAYNLHLLGGRPIVMATVGQDFGPYREHFETLGIDLSRVKIIDDLSTPQGFITTDMDQNQITAFHSGAMMRSYENHVRDVPGVTLGLVGPDGREGMIQNAEEFAAMGIPFIFDPGQAVPLFSGPELREFIEQADYVVVNDYESRLLQARTGWNEQDIVSRVQAYITTQGSAGAVVMTPEKRYVIPAAKTSRVVDPTGCGDAFRAGLIYGIQHEYDWLTIGRMGNLMGALKVEHPGTQNQRFTFGEFNDRFKQYFGYAL

SEQ ID NO: 1913 - DNA, 963 bp, synthetic construct
  misc_feature 1..963: note = variant of adenosine kinase from Xanthemonas campestris
  source 1..963: mol_type = other DNA
atgcatcatcaccatcaccatggggggtccggtatgagtgcactcatttgcggttctttagcgtatgataacatcatgtggtttccggactatttcaagaaccatattctgcccgatcgtgttcaccgcctcaatgtcagctttctggtatttgacatgcgtcgtgaatttggaggctgtgccggcaacattgcgtacaatctgcatctgttgggtggtcgcccgatcgtaatggctacggtgggccaagatttcggtccgtatcgcgaacacttcgaaactctgggcattgacttatcccgcgtcaagatcatccttgatctgagtacaccgcaggggttcattaccaccgacatggatcaaaaccagattacggcgtttcacagcggcgcaatgatgcgttcgtacgaaaatcacgttcgtgatgtgccgggtgttaccttgggcctcgtaggtcctgatggacgcgagggcatgatccaaaatgccgaagaatttgctgctatgggcattccgttcatttttgacccaggtcaggcagtgcctctgttcagcggcccggaactgcgcgaatttatcgaacaggcggactatgtggtggtcaacgattacgaaagccgccttcttcaagcccgtactggctggaacgagcaggacattgttagccgcgtgcaggcgtatatcaccacgcaaggttcggctggagccgtggtaatgacaccggagaagcgctacgttattccggctgctaaaacttctcgtgtcgttgatccaactggttgcggcgacgcgtttcgcgccggcctgatctatggtattcagcatgaatatgattggttgaccattggccgcatgggaaacttaatgggtgcgctgaaagtggaacaccctggcacccaaaatcagcgtttcacctttgccgaattcaacgaccggttcaaacaatattttggctacgcgctc

SEQ ID NO: 1914 - protein, 321 aa, synthetic construct
  REGION 1..321: note = variant of adenosine kinase from Xanthemonas campestris
MHHHHHHGGSGMSALICGSLAYDNIMWFPDYFKNHILPDRVHRLNVSFLVFDMRREFGGCAGNIAYNLHLLGGRPIVMATVGQDFGPYREHFETLGIDLSRVKIILDLSTPQGFITTDMDQNQITAFHSGAMMRSYENHVRDVPGVTLGLVGPDGREGMIQNAEEFAAMGIPFIFDPGQAVPLFSGPELREFIEQADYVVVNDYESRLLQARTGWNEQDIVSRVQAYITTQGSAGAVVMTPEKRYVIPAAKTSRVVDPTGCGDAFRAGLIYGIQHEYDWLTIGRMGNLMGALKVEHPGTQNQRFTFAEFNDRFKQYFGYAL

SEQ ID NO: 1915 - DNA, 963 bp, synthetic construct
  misc_feature 1..963: note = variant of adenosine kinase from Xanthemonas campestris
  source 1..963: mol_type = other DNA
atgcatcatcaccatcaccatggggggtccggtatgagtgcactcatttgcggttctttagcgtatgataacatcatgtggtttccggactatttcaagaaccatattctgcccgatcgtgttcaccgcctcaatgtcagctttctggtatttgacatgcgtcgtgaatttggaggctgtgccggcaacattgcgtacaatctgcatctgttgggtggtcgcccgatcgtaatggctacggtgggccaagatttcggtccgtatcgcgaacacttcgaaactctgggcattgacttatcccgcgtcaagatcatcgatgatctgagtacaccgcaggggttcattaccaccgacatggatcaaaaccagattacggcgtttcacagcggcgcaatgatgcgttcgtacgaaaatcacgttcgtgatgtgccgggtgttaccttgggcctcgtaggtcctgatacccgcgagggcatgatccaaaatgccgaagaatttgctgctatgggcattccgttcatttttgacccaggtcaggcagtgcctctgttcagcggcccggaactgcgcgaatttatcgaacaggcggactatgtggtggtcaacgattacgaaagccgccttcttcaagcccgtactggctggaacgagcaggacattgttagccgcgtgcaggcgtatatcaccacgcaaggttcggctggagccgtggtaatgacaccggagaagcgctacgttattccggctgctaaaacttctcgtgtcgttgatccaactggttgcggcgacgcgtttcgcgccggcctgatctatggtattcagcatgaatatgattggttgaccattggccgcatgggaaacttaatgggtgcgctgaaagtggaacaccctggcggccaaaatcagcgtttcacctttgccgaattcaacgaccggttcaaacaatattttggctacgcgctc

SEQ ID NO: 1916 - protein, 321 aa, synthetic construct
  REGION 1..321: note = variant of adenosine kinase from Xanthemonas campestris
MHHHHHHGGSGMSALICGSLAYDNIMWFPDYFKNHILPDRVHRLNVSFLVFDMRREFGGCAGNIAYNLHLLGGRPIVMATVGQDFGPYREHFETLGIDLSRVKIIDDLSTPQGFITTDMDQNQITAFHSGAMMRSYENHVRDVPGVTLGLVGPDTREGMIQNAEEFAAMGIPFIFDPGQAVPLFSGPELREFIEQADYVVVNDYESRLLQARTGWNEQDIVSRVQAYITTQGSAGAVVMTPEKRYVIPAAKTSRVVDPTGCGDAFRAGLIYGIQHEYDWLTIGRMGNLMGALKVEHPGGQNQRFTFAEFNDRFKQYFGYAL

SEQ ID NO: 1917 - DNA, 963 bp, synthetic construct
  misc_feature 1..963: note = variant of adenosine kinase from Xanthemonas campestris
  source 1..963: mol_type = other DNA
atgcatcatcaccatcaccatggggggtccggtatgagtgcactcatttgcggttctttagcgtatgataacatcatgtggtttccggactatttcaagaaccatattctgcccgatcgtgttcaccgcctcaatgtcagctttctggtatttgacatgcgtcgtgaatttggaggctgtgccggcaacattgcgtacaatctgcatctgttgggtggtcgcccgatcgtaatggctacggtgggccaagatttcggtccgtatcgcgaacacttcgaaactctgggcattgacttatcccgcgtcaagatcatcgatgatctgagtacaccgcaggggttcattaccaccgacatggatcaaaaccagattacgctgtttcacagcggcgcaatgatgcgttcgtacgaaaatcacgttcgtgatgtgccgggtgttaccttgggcctcgtaggtcctgatggccgcgagggcatgatccaaaatgccgaagaatttgctgctatgggcattccgttcatttttgacccaggtcaggcagtgcctctgttcagcggcccggaactgcgcgaatttatcgaacaggcggactatgtggtggtcaacgattacgaaagccgccttcttcaagcccgtactggctggaacgagcaggacattgttagccgcgtgcaggcgtatatcaccacgcaaggttcggctggagccgtggtaatgacaccggagaagcgctacgttattccggctgctaaaacttctcgtgtcgttgatccaactggttgcggcgacgcgtttcgcgccggcctgatctatggtattcagcatgaatatgattggttgaccattggccgcatgggaaacttaatgggtgcgctgaaagtggaacaccctggcggccaaaatcagcgtttcacctttgccgaattcaacgaccggttcaaacaatattttggctacgcgctc

SEQ ID NO: 1918 - protein, 321 aa, synthetic construct
  REGION 1..321: note = variant of adenosine kinase from Xanthemonas campestris
MHHHHHHGGSGMSALICGSLAYDNIMWFPDYFKNHILPDRVHRLNVSFLVFDMRREFGGCAGNIAYNLHLLGGRPIVMATVGQDFGPYREHFETLGIDLSRVKIIDDLSTPQGFITTDMDQNQITLFHSGAMMRSYENHVRDVPGVTLGLVGPDGREGMIQNAEEFAAMGIPFIFDPGQAVPLFSGPELREFIEQADYVVVNDYESRLLQARTGWNEQDIVSRVQAYITTQGSAGAVVMTPEKRYVIPAAKTSRVVDPTGCGDAFRAGLIYGIQHEYDWLTIGRMGNLMGALKVEHPGGQNQRFTFAEFNDRFKQYFGYAL

SEQ ID NO: 1919 - DNA, 963 bp, synthetic construct
  misc_feature 1..963: note = variant of adenosine kinase from Xanthemonas campestris
  source 1..963: mol_type = other DNA
atgcatcatcaccatcaccatggggggtccggtatgagtgcactcatttgcggttctttagcgtatgataacatcatgtggtttccggactatttcaagaaccatattctgcccgatcgtgttcaccgcctcaatgtcagctttctggtatttgacatgcgtcgtgaatttggaggctgtgccggcaacattgcgtacaatctgcatctgttgggtggtcgcccgatcgtaatggctacggtgggccaagatttcggtccgtatcgcgaacacttcgaaactctgggcattgacttatcccgcgtcaagatcatcgatgatctgagtacaccgattgggttcattaccaccgacatggatcaaaaccagattacggcgtttcacagcggcgcaatgatgcgttcgtacgaaaatcacgttcgtgatgtgccgggtgttaccttgggcctcgtaggtcctgatggacgcgagggcatgatccaaaatgccgaagaatttgctgctatgggcattccgttcatttttgacccaggtcaggcagtgcctgtgttcagcggcccggaactgcgcgaatttatcgaacaggcggactatgtggtggtcaacgattacgaaagccgccttcttcaagcccgtactggctggaacgagcaggacattgttagccgcgtgcaggcgtatatcaccacgcaaggttcggctggagccgtggtaatgacaccggagaagcgctacgttattccggctgctaaaacttctcgtgtcgttgatccaactggttgcggcgacgcgtttcgcgccggcctgatctatggtattcagcatgaatatgattggttgaccattggccgcatgggaaacttaatgggtgcgattaaagtggaacaccctggcggccaaaatcagcgtttcacctttgccgaattcaacgaccggttcaaacaatattttggctacgcgctc

SEQ ID NO: 1920 - protein, 321 aa, synthetic construct
  REGION 1..321: note = variant of adenosine kinase from Xanthemonas campestris
MHHHHHHGGSGMSALICGSLAYDNIMWFPDYFKNHILPDRVHRLNVSFLVFDMRREFGGCAGNIAYNLHLLGGRPIVMATVGQDFGPYREHFETLGIDLSRVKIIDDLSTPIGFITTDMDQNQITAFHSGAMMRSYENHVRDVPGVTLGLVGPDGREGMIQNAEEFAAMGIPFIFDPGQAVPVFSGPELREFIEQADYVVVNDYESRLLQARTGWNEQDIVSRVQAYITTQGSAGAVVMTPEKRYVIPAAKTSRVVDPTGCGDAFRAGLIYGIQHEYDWLTIGRMGNLMGAIKVEHPGGQNQRFTFAEFNDRFKQYFGYAL

SEQ ID NO: 1921 - DNA, 963 bp, synthetic construct
  misc_feature 1..963: note = variant of adenosine kinase from Xanthemonas campestris
  source 1..963: mol_type = other DNA
atgcatcatcaccatcaccatggggggtccggtatgagtgcactcatttgcggttctttagcgtatgataacatcatgtggtttccggactatttcaagaaccatattctgcccgatcgtgttcaccgcctcaatgtcagctttctggtatttgacatgcgtcgtgaatttggaggctgtgccggcaacattgcgtacaatctgcatctgttgggtggtcgcccgatcgtaatggctacggtgggccaagatttcggtccgtatcgcgaacacttcgaaactctgggcattgacttatcccgcgtcaagatcatcgatgatctgagtacaccgcaggggttcattaccaccgacatggatcaaaaccagattacggcgtttcacagcggcgcaatgatgcgttcgtacgaaaatcacgttcgtgatgtgccgggtgttaccttgggcctcgtaggtcctgatacccgcgagggcatgatccaaaatgccgaagaatttgctgctatgggcattccgttcatttttgacccaggtcaggcagtgcctgtgttcagcggcccggaactgcgcgaatttatcgaacaggcggactatgtggtggtcaacgattacgaaagccgccttcttcaagcccgtactggctggaacgagcaggacattgttagccgcgtgcaggcgtatatcaccacgcaaggttcggctggagccgtggtaatgacaccggagaagcgctacgttattccggctgctaaaacttctcgtgtcgttgatccaactggttgcggcgacgcgtttcgcgccggcctgatctatggtattcagcatgaatatgattggttgaccattggccgcatgggaaacttaatgggtgcgctgaaagtggaacaccctggcggccaaaatcagcgtttcacctttgccgaattcaacgaccggttcaaacaatattttggctacgcgctc

SEQ ID NO: 1922 - protein, 321 aa, synthetic construct
  REGION 1..321: note = variant of adenosine kinase from Xanthemonas campestris
MHHHHHHGGSGMSALICGSLAYDNIMWFPDYFKNHILPDRVHRLNVSFLVFDMRREFGGCAGNIAYNLHLLGGRPIVMATVGQDFGPYREHFETLGIDLSRVKIIDDLSTPQGFITTDMDQNQITAFHSGAMMRSYENHVRDVPGVTLGLVGPDTREGMIQNAEEFAAMGIPFIFDPGQAVPVFSGPELREFIEQADYVVVNDYESRLLQARTGWNEQDIVSRVQAYITTQGSAGAVVMTPEKRYVIPAAKTSRVVDPTGCGDAFRAGLIYGIQHEYDWLTIGRMGNLMGALKVEHPGGQNQRFTFAEFNDRFKQYFGYAL

SEQ ID NO: 1923 - DNA, 963 bp, synthetic construct
  misc_feature 1..963: note = variant of adenosine kinase from Xanthemonas campestris
  source 1..963: mol_type = other DNA
atgcatcatcaccatcaccatggggggtccggtatgagtgcactcatttgcggttctttagcgtatgataacatcatgtggtttccggactatttcaagaaccatattctgcccgatcgtgttcaccgcctcaatgtcagctttctggtatttgacatgcgtcgtgaatttggaggctgtgccggcaacattgcgtacaatctgcatctgttgggtggtcgcccgatcgtaatggctacggtgggccaagatttcggtccgtatcgcgaacacttcgaaactctgggcattgacttatcccgcgtcaagatcatcgatgatctgagtacaccgcaggggttcattaccaccgacatggatcaaaaccagattacggcgtttcacagcggcgcaatgatgcgttcgtacgaaaatcacgttcgtgatgtgccgggtgttaccttgggcctcgtaggtcctgatggacgcgagggcatgatccaaaatgccgaagaatttgctgctatgggcattccgttcatttttgacccaggtcaggcagtgcctctgttcagcggcccggaactgcgcgaatttatcgaacaggcggactatgtggtggtcaacgattacgaaagccgccttcttcaagcccgtactggctggaacgagcaggacattgttagccgcgtgcaggcgtatatcaccacgcaaggttcggctggagccgtggtaatgacaccggagaagcgctacgttattccggctgctaaaacttctcgtattgttgatccaactggttgcggcgacgcgtttcgcgccggcctgatctatggtattcagcatgaatatgattggttgaccattggccgcatgggaaacttaatgggtgcgctgaaagtggaacaccctggcggccaaaatcagcgtttcacctttgccgaattcaacgaccggttcaaacaatattttggctacgcgctc

SEQ ID NO: 1924 - protein, 321 aa, synthetic construct
  REGION 1..321: note = variant of adenosine kinase from Xanthemonas campestris
MHHHHHHGGSGMSALICGSLAYDNIMWFPDYFKNHILPDRVHRLNVSFLVFDMRREFGGCAGNIAYNLHLLGGRPIVMATVGQDFGPYREHFETLGIDLSRVKIIDDLSTPQGFITTDMDQNQITAFHSGAMMRSYENHVRDVPGVTLGLVGPDGREGMIQNAEEFAAMGIPFIFDPGQAVPLFSGPELREFIEQADYVVVNDYESRLLQARTGWNEQDIVSRVQAYITTQGSAGAVVMTPEKRYVIPAAKTSRIVDPTGCGDAFRAGLIYGIQHEYDWLTIGRMGNLMGALKVEHPGGQNQRFTFAEFNDRFKQYFGYAL

SEQ ID NO: 1925 - DNA, 963 bp, synthetic construct
  misc_feature 1..963: note = variant of adenosine kinase from Xanthemonas campestris
  source 1..963: mol_type = other DNA
atgcatcatcaccatcaccatggggggtccggtatgagtgcactcatttgcggttctttagcgtatgataacatcatgtggtttccggactatttcaagaaccatattctgcccgatcgtgttcaccgcctcaatgtcagctttctggtatttgacatgcgtcgtgaatttggaggctgtgccggcaacattgcgtacaatctgcatctgttgggtggtcgcccgatcgtaatggctacggtgggccaagatttcggtccgtatcgcgaacacttcgaaactctgggcattgacttatcccgcgtcaagatcatcgatgatctgagtacaccgcaggggttcattaccaccgacatggatcaaaaccagattacggcgtttcacagcggcgcaatgatgcgttcgtacgaaaatcacgttcgtgatgtgccgggtgttaccttgggcctcgtaggtcctgatggccgcgagggcatgatccaaaatgccgaagaatttgctgctatgggcattccgttcatttttgacccaggtcaggcagtgcctgtgttcagcggcccggaactgcgcgaatttatcgaacaggcggactatgtggtggtcaacgattacgaaagccgccttcttcaagcccgtactggctggaacgagcaggacattgttagccgcgtgcaggcgtatatcaccacgcaaggttcggctggagccgtggtaatgacaccggagaagcgctacgttattccggctgctaaaacttctcgtgtcgttgatccaactggttgcggcgacgcgtttcgcgccggcctgatctatggtattcagcatgaatatgattggttgaccattggccgcatgggaaacttaatgggtgcgcttaaagtggaacaccctggcggccaaaatcagcgtttcacctttgccgaattcaacgaccggttcaaacaatattttggctacgcgctc

SEQ ID NO: 1926 - protein, 321 aa, synthetic construct
  REGION 1..321: note = variant of adenosine kinase from Xanthemonas campestris
MHHHHHHGGSGMSALICGSLAYDNIMWFPDYFKNHILPDRVHRLNVSFLVFDMRREFGGCAGNIAYNLHLLGGRPIVMATVGQDFGPYREHFETLGIDLSRVKIIDDLSTPQGFITTDMDQNQITAFHSGAMMRSYENHVRDVPGVTLGLVGPDGREGMIQNAEEFAAMGIPFIFDPGQAVPVFSGPELREFIEQADYVVVNDYESRLLQARTGWNEQDIVSRVQAYITTQGSAGAVVMTPEKRYVIPAAKTSRVVDPTGCGDAFRAGLIYGIQHEYDWLTIGRMGNLMGALKVEHPGGQNQRFTFAEFNDRFKQYFGYAL

SEQ ID NO: 1927 - DNA, 963 bp, synthetic construct
  misc_feature 1..963: note = variant of adenosine kinase from Xanthemonas campestris
  source 1..963: mol_type = other DNA
atgcatcatcaccatcaccatggggggtccggtatgagtgcactcatttgcggttctttagcgtatgataacatcatgtggtttccggactatttcaagaaccatattctgcccgatcgtgttcaccgcctcaatgtcagctttctggtatttgacatgcgtcgtgaatttggaggctgtgccggcaacattgcgtacaatctgcatctgttgggtggtcgcccgatcgtaatggctacggtgggccaagatttcggtccgtatcgcgaacacttcgaaactctgggcattgacttatcccgcgtcaagatcatcgatgatctgagtacaccgcaggggttcattaccaccgacatggatcaaaaccagattacggcgtttcacagcggcgcaatgatgcgttcgtacgaaaatcacgttcgtgatgtgccgggtgttaccttgggcctcgtaggtcctgatggacgcgagggcatgatccaaaatgccgaagaatttgctgctatgggcattccgttcatttttgacccaggtcaggcagtgcctgtgttcagcggcccggaactgcgcgaatttatcgaacaggcggactatgtggtggtcaacgattacgaaagccgccttcttcaagcccgtactggctggaacgagcaggacattgttagccgcgtgcaggcgtatatcaccacgcaaggttcggctggagccgtggtaatgacaccggagaagcgctacgttattccggctgctaaaacttctcgtattgttgatccaactggttgcggcgacgcgtttcgcgccggcctgatctatggtattcagcatgaatatgattggttgaccattggccgcatgggaaacttaatgggtgcgctgaaagtggaacaccctggcggccaaaatcagcgtttcacctttgccgaattcaacgaccggttcaaacaatattttggctacgcgctc

SEQ ID NO: 1928 - protein, 321 aa, synthetic construct
  REGION 1..321: note = variant of adenosine kinase from Xanthemonas campestris
MHHHHHHGGSGMSALICGSLAYDNIMWFPDYFKNHILPDRVHRLNVSFLVFDMRREFGGCAGNIAYNLHLLGGRPIVMATVGQDFGPYREHFETLGIDLSRVKIIDDLSTPQGFITTDMDQNQITAFHSGAMMRSYENHVRDVPGVTLGLVGPDGREGMIQNAEEFAAMGIPFIFDPGQAVPVFSGPELREFIEQADYVVVNDYESRLLQARTGWNEQDIVSRVQAYITTQGSAGAVVMTPEKRYVIPAAKTSRIVDPTGCGDAFRAGLIYGIQHEYDWLTIGRMGNLMGALKVEHPGGQNQRFTFAEFNDRFKQYFGYAL

SEQ ID NO: 1929 - DNA, 963 bp, synthetic construct
  misc_feature 1..963: note = variant of adenosine kinase from Xanthemonas campestris
  source 1..963: mol_type = other DNA
atgcatcatcaccatcaccatggggggtccggtatgagtgcactcatttgcggttctttagcgtatgataacatcatgtggtttccggactatttcaagaaccatattctgcccgatcgtgttcaccgcctcaatgtcagctttctggtatttgacatgcgtcgtgaatttggaggctgtgccggcaacattgcgtacaatctgcatctgttgggtggtcgcccgatcgtaatggctacggtgggccaagatttcggtccgtatcgcgaacacttcgaaactctgggcattgacttatcccgcgtcaagatcatcgatgatctgagtacaccgcaggggttcattaccaccgacatggatcaaaaccagattacggcgtttcacagcggcgcaatgatgcgttcgtacgaaaatcacgttcgtgatgtgccgggtgttaccttgggcctcgtaggtcctgatacccgcgagggcatgatccaaaatgccgaagaatttgctgctatgggcattccgttcatttttgacccaggtcaggcagtgcctctgttcagcggcccggaactgcgcgaatttatcgaacaggcggactatgtggtggtcaacgattacgaaagccgccttcttcaagcccgtactggctggaacgagcaggacattgttagccgcgtgcaggcgtatatcaccacgcaaggttcggctggagccgtggtaatgacaccggagaagcgctacgttattccggctgctaaaacttctcgtgtcgttgatccaactggttgcggcgacgcgtttcgcgccggcctgatctatggtattcagcatgaatatgattggttgaccattggccgcatgggaaacttaatgggtgcgctgaaagtggaacaccctggcacccaaaatcagcgtttcacctttgccgaattcaacgaccggttcaaacaatattttggctacgcgctc

SEQ ID NO: 1930 - protein, 321 aa, synthetic construct
  REGION 1..321: note = variant of adenosine kinase from Xanthemonas campestris
MHHHHHHGGSGMSALICGSLAYDNIMWFPDYFKNHILPDRVHRLNVSFLVFDMRREFGGCAGNIAYNLHLLGGRPIVMATVGQDFGPYREHFETLGIDLSRVKIIDDLSTPQGFITTDMDQNQITAFHSGAMMRSYENHVRDVPGVTLGLVGPDTREGMIQNAEEFAAMGIPFIFDPGQAVPLFSGPELREFIEQADYVVVNDYESRLLQARTGWNEQDIVSRVQAYITTQGSAGAVVMTPEKRYVIPAAKTSRVVDPTGCGDAFRAGLIYGIQHEYDWLTIGRMGNLMGALKVEHPGTQNQRFTFAEFNDRFKQYFGYAL

SEQ ID NO: 1931 - DNA, 963 bp, synthetic construct
  misc_feature 1..963: note = variant of adenosine kinase from Xanthemonas campestris
  source 1..963: mol_type = other DNA
atgcatcatcaccatcaccatggggggtccggtatgagtgcactcatttgcggttctttagcgtatgataacatcatgtggtttccggactatttcaagaaccatattctgcccgatcgtgttcaccgcctcaatgtcagctttctggtatttgacatgcgtcgtgaatttggaggctgtgccggcaacattgcgtacaatctgcatctgttgggtggtcgcccgatcgtaatggctacggtgggccaagatttcggtccgtatcgcgaacacttcgaaactctgggcattgacttatcccgcgtcaagatcatcgatgatctgagtacaccgattgggttcattaccaccgacatggatcaaaaccagattacggcgtttcacagcggcgcaatgatgcgttcgtacgaaaatcacgttcgtgatgtgccgggtgttaccttgggcctcgtaggtcctgatggccgcgagggcatgatccaaaatgccgaagaatttgctgctatgggcattccgttcatttttgacccaggtcaggcagtgcctctgttcagcggcccggaactgcgcgaatttatcgaacaggcggactatgtggtggtcaacgattacgaaagccgccttcttcaagcccgtactggctggaacgagcaggacattgttagccgcgtgcaggcgtatatcaccacgcaaggttcggctggagccgtggtaatgacaccggagaagcgctacgttattccggctgctaaaacttctcgtgtcgttgatccaactggttgcggcgacgcgtttcgcgccggcctgatctatggtattcagcatgaatatgattggttgaccattggccgcatgggaaacttaatgggtgcgattaaagtggaacaccctggcacccaaaatcagcgtttcacctttgccgaattcaacgaccggttcaaacaatattttggctacgcgctc

SEQ ID NO: 1932 - protein, 321 aa, synthetic construct
  REGION 1..321: note = variant of adenosine kinase from Xanthemonas campestris
MHHHHHHGGSGMSALICGSLAYDNIMWFPDYFKNHILPDRVHRLNVSFLVFDMRREFGGCAGNIAYNLHLLGGRPIVMATVGQDFGPYREHFETLGIDLSRVKIIDDLSTPIGFITTDMDQNQITAFHSGAMMRSYENHVRDVPGVTLGLVGPDGREGMIQNAEEFAAMGIPFIFDPGQAVPLFSGPELREFIEQADYVVVNDYESRLLQARTGWNEQDIVSRVQAYITTQGSAGAVVMTPEKRYVIPAAKTSRVVDPTGCGDAFRAGLIYGIQHEYDWLTIGRMGNLMGAIKVEHPGTQNQRFTFAEFNDRFKQYFGYAL

SEQ ID NO: 1933 - DNA, 963 bp, synthetic construct
  misc_feature 1..963: note = variant of adenosine kinase from Xanthemonas campestris
  source 1..963: mol_type = other DNA
atgcatcatcaccatcaccatggggggtccggtatgagtgcactcatttgcggttctttagcgtatgataacatcatgtggtttccggactatttcaagaaccatattctgcccgatcgtgttcaccgcctcaatgtcagctttctggtatttgacatgcgtcgtgaatttggaggctgtgccggcaacattgcgtacaatctgcatctgttgggtggtcgcccgatcgtaatggctacggtgggccaagatttcggtccgtatcgcgaacacttcgaaactctgggcattgacttatcccgcgtcaagatcatcgatgatctgagtacaccgcaggggttcattaccaccgacatggatcaaaaccagattacggcgtttcacagcggcgcaatgatgcgttcgtacgaaaatcacgttcgtgatgtgccgggtgttaccttgggcctcgtaggtcctgatggacgcgagggcatgatccaaaatgccgaagaatttgctgctatgggcattccgttcatttttgacccaggtcaggcagtgcctctgttcagcggcccggaactgcgcgaatttatcgaacaggcggactatgtggtggtcaacgattacgaaagccgccttcttcaagcccgtactggctggaacgagcaggacattgttagccgcgtgcaggcgtatatcaccacgcaaggttcggctggagccgtggtaatgacaccggagaagcgctacgttattccggctgctaaaacttctcgtgttgttgatccaactggttgcggcgacgcgtttcgcgccggcctgatctatggtattcagcatgaatatgattggttgaccattggccgcatgggaaacttaatgggtgcgattaaagtggaacaccctggcacccaaaatcagcgtttcacctttgccgaattcaacgaccggttcaaacaatattttggctacgcgctc

SEQ ID NO: 1934 - protein, 321 aa, synthetic construct
  REGION 1..321: note = variant of adenosine kinase from Xanthemonas campestris
MHHHHHHGGSGMSALICGSLAYDNIMWFPDYFKNHILPDRVHRLNVSFLVFDMRREFGGCAGNIAYNLHLLGGRPIVMATVGQDFGPYREHFETLGIDLSRVKIIDDLSTPQGFITTDMDQNQITAFHSGAMMRSYENHVRDVPGVTLGLVGPDGREGMIQNAEEFAAMGIPFIFDPGQAVPLFSGPELREFIEQADYVVVNDYESRLLQARTGWNEQDIVSRVQAYITTQGSAGAVVMTPEKRYVIPAAKTSRVVDPTGCGDAFRAGLIYGIQHEYDWLTIGRMGNLMGAIKVEHPGTQNQRFTFAEFNDRFKQYFGYAL

SEQ ID NO: 1935 - DNA, 963 bp, synthetic construct
  misc_feature 1..963: note = variant of adenosine kinase from Xanthemonas campestris
  source 1..963: mol_type = other DNA
atgcatcatcaccatcaccatggggggtccggtatgagtgcactcatttgcggttctttagcgtatgataacatcatgtggtttccggactatttcaagaaccatattctgcccgatcgtgttcaccgcctcaatgtcagctttctggtatttgacatgcgtcgtgaatttggaggctgtgccggcaacattgcgtacaatctgcatctgttgggtggtcgcccgatcgtaatggctacggtgggccaagatttcggtccgtatcgcgaacacttcgaaactctgggcattgacttatcccgcgtcaagatcatcgatgatctgagtacaccgcaggggttcattaccaccgacatggatcaaaaccagattacggcgtttcacagcggcgcaatgatgcgttcgtacgaaaatcacgttcgtgatgtgccgggtgttaccttgggcctcgtaggtcctgatggacgcgagggcatgatccaaaatgccgaagaatttgctgctatgggcattccgttcatttttgacccaggtcaggcagtgcctctgttcagcggcccggaactgcgcgaatttatcgaacaggcggactatgtggtggtcaacgattacgaaagccgccttcttcaagcccgtactggctggaacgagcaggacattgttagccgcgtgcaggcgtatatccatacgcaaggttcggctggagccgtggtaatgacaccggagaagcgctacgttattccggctgctaaaacttctcgtgtcgttgatccaactggttgcggcgacgcgtttcgcgccggcctgatctatggtattcagcatgaatatgattggttgaccattggccgcatgggaaacttaatgggtgcgctgaaagtggaacaccctggcggccaaaatcagcgtttcacctttgccgaattcaacgaccggttcaaacaatattttggctacgcgctc

SEQ ID NO: 1936 - protein, 321 aa, synthetic construct
  REGION 1..321: note = variant of adenosine kinase from Xanthemonas campestris
MHHHHHHGGSGMSALICGSLAYDNIMWFPDYFKNHILPDRVHRLNVSFLVFDMRREFGGCAGNIAYNLHLLGGRPIVMATVGQDFGPYREHFETLGIDLSRVKIIDDLSTPQGFITTDMDQNQITAFHSGAMMRSYENHVRDVPGVTLGLVGPDGREGMIQNAEEFAAMGIPFIFDPGQAVPLFSGPELREFIEQADYVVVNDYESRLLQARTGWNEQDIVSRVQAYIHTQGSAGAVVMTPEKRYVIPAAKTSRVVDPTGCGDAFRAGLIYGIQHEYDWLTIGRMGNLMGALKVEHPGGQNQRFTFAEFNDRFKQYFGYAL

SEQ ID NO: 1937 - DNA, 963 bp, synthetic construct
  misc_feature 1..963: note = variant of adenosine kinase from Xanthemonas campestris
  source 1..963: mol_type = other DNA
atgcatcatcaccatcaccatggggggtccggtatgagtgcactcatttgcggttctttagcgtatgataacatcatgtcgtttccggactatttcaagaaccatattctgcccgatcgtgttcaccgcctcaatgtcagctttctggtatttgacatgcgtcgtgaatttggaggctgtgccggcaacattgcgtacaatctgcatctgttgggtggtcgcccgatcgtaatggctacggtgggccaagatttcggtccgtatcgcgaacacttcgaaactctgggcattgacttatcccgcgtcaagatcatcgatgatctgagtacaccgcaggggttcattaccaccgacatggatcaaaaccagattacgctgtttcacagcggcgcaatgatgcgttcgtacgaaaatcacgttcgtgatgtgccgggtgttaccttgggcctcgtaggtcctgatggccgcgagggcatgatccaaaatgccgaagaatttgctgctatgggcattccgttcatttttgacccaggtcaggcagtgcctctgttcagcggcccggaactgcgcgaatttatcgaacaggcggactatgtggtggtcaacgattacgaaagccgccttcttcaagcccgtactggctggaacgagcaggacattgttagccgcgtgcaggcgtatatcaccacgcaaggttcggctggagccgtggtaatgacaccggagaagcgctacgttattccggctgctaaaacttctcgtgtcgttgatccaactggttgcggcgacgcgtttcgcgccggcctgatctatggtattcagcatgaatatgattggttgaccattggccgcatgggaaacttaatgggtgcgctgaaagtggaacaccctggcggccaaaatcagcgtttcacctttgccgaattcaacgaccggttcaaacaatattttggctacgcgctc

SEQ ID NO: 1938 - protein, 321 aa, synthetic construct
  REGION 1..321: note = variant of adenosine kinase from Xanthemonas campestris
MHHHHHHGGSGMSALICGSLAYDNIMSFPDYFKNHILPDRVHRLNVSFLVFDMRREFGGCAGNIAYNLHLLGGRPIVMATVGQDFGPYREHFETLGIDLSRVKIIDDLSTPQGFITTDMDQNQITLFHSGAMMRSYENHVRDVPGVTLGLVGPDGREGMIQNAEEFAAMGIPFIFDPGQAVPLFSGPELREFIEQADYVVVNDYESRLLQARTGWNEQDIVSRVQAYITTQGSAGAVVMTPEKRYVIPAAKTSRVVDPTGCGDAFRAGLIYGIQHEYDWLTIGRMGNLMGALKVEHPGGQNQRFTFAEFNDRFKQYFGYAL

SEQ ID NO: 1939 - DNA, 963 bp, synthetic construct
  misc_feature 1..963: note = variant of adenosine kinase from Xanthemonas campestris
  source 1..963: mol_type = other DNA
atgcatcatcaccatcaccatggggggtccggtatgagtgcactcatttgcggttctttagcgtatgataacatcatgaggtttccggactatttcaagaaccatattctgcccgatcgtgttcaccgcctcaatgtcagctttctggtatttgacatgcgtcgtgaatttggaggctgtgccggcaacattgcgtacaatctgcatctgttgggtggtcgcccgatcgtaatggctacggtgggccaagatttcggtccgtatcgcgaacacttcgaaactctgggcattgacttatcccgcgtcaagatcatcgatgatctgagtacaccgcaggggttcattaccaccgacatggatcaaaaccagattacgctgtttcacagcggcgcaatgatgcgttcgtacgaaaatcacgttcgtgatgtgccgggtgttaccttgggcctcgtaggtcctgatggccgcgagggcatgatccaaaatgccgaagaatttgctgctatgggcattccgttcatttttgacccaggtcaggcagtgcctctgttcagcggcccggaactgcgcgaatttatcgaacaggcggactatgtggtggtcaacgattacgaaagccgccttcttcaagcccgtactggctggaacgagcaggacattgttagccgcgtgcaggcgtatatcaccacgcaaggttcggctggagccgtggtaatgacaccggagaagcgctacgttattccggctgctaaaacttctcgtgtcgttgatccaactggttgcggcgacgcgtttcgcgccggcctgatctatggtattcagcatgaatatgattggttgaccattggccgcatgggaaacttaatgggtgcgctgaaagtggaacaccctggcggccaaaatcagcgtttcacctttgccgaattcaacgaccggttcaaacaatattttggctacgcgctc

SEQ ID NO: 1940 - protein, 321 aa, synthetic construct
  REGION 1..321: note = variant of adenosine kinase from Xanthemonas campestris
MHHHHHHGGSGMSALICGSLAYDNIMRFPDYFKNHILPDRVHRLNVSFLVFDMRREFGGCAGNIAYNLHLLGGRPIVMATVGQDFGPYREHFETLGIDLSRVKIIDDLSTPQGFITTDMDQNQITLFHSGAMMRSYENHVRDVPGVTLGLVGPDGREGMIQNAEEFAAMGIPFIFDPGQAVPLFSGPELREFIEQADYVVVNDYESRLLQARTGWNEQDIVSRVQAYITTQGSAGAVVMTPEKRYVIPAAKTSRVVDPTGCGDAFRAGLIYGIQHEYDWLTIGRMGNLMGALKVEHPGGQNQRFTFAEFNDRFKQYFGYAL

SEQ ID NO: 1941 - DNA, 963 bp, synthetic construct
  misc_feature 1..963: note = variant of adenosine kinase from Xanthemonas campestris
  source 1..963: mol_type = other DNA
atgcatcatcaccatcaccatggggggtccggtatgagtgcactcatttgcggttctttagcgtatgataacatcatgtggtttccggactatttcaagaaccatattctgcccgatcgtgttcaccgcctcaatgtcagctttctggtatttgacatgcgtcgtgaatttggaggctgtgccggcaacattgcgtacaatctgcatctgttgggtggtcgcccgatcgtaatggctacggtgggccaagatttcggtccgtatcgcgaacacttcgaaactctgggcattgacttatcccgcgtcaagatcatcgatgatctgagtacaccgcaggggttcattaccaccgacatggatcaaaaccagattacgctgtttcacagcggcgcaatgatgcgttcgtacgaaaatcacgttcgtgatgtgccgggtgttaccttgggcctcgtaggtcctgatggccgcgagggcatgatccaaaatgccgaagaatttgctgctatgggcattccgttcatttttgacccaggtcaggcagtgcctctgttcagcggcccggaactgcgcgaatttatcgaacaggcggactatgtggtggtcaacgattacgaaagccgccttcttcaagcccgtactggctggaacgagcaggacattgttagccgcgtgcaggcgtatatcaccacgcaaggttcggctggagccgtggtaatgacaccggagaagcgctacgttattccggctgctaaagcttctcgtgtcgttgatccaactggttgcggcgacgcgtttcgcgccggcctgatctatggtattcagcatgaatatgattggttgaccattggccgcatgggaaacttaatgggtgcgctgaaagtggaacaccctggcggccaaaatcagcgtttcacctttgccgaattcaacgaccggttcaaacaatattttggctacgcgctc

SEQ ID NO: 1942 - protein, 321 aa, synthetic construct
  REGION 1..321: note = variant of adenosine kinase from Xanthemonas campestris
MHHHHHHGGSGMSALICGSLAYDNIMWFPDYFKNHILPDRVHRLNVSFLVFDMRREFGGCAGNIAYNLHLLGGRPIVMATVGQDFGPYREHFETLGIDLSRVKIIDDLSTPQGFITTDMDQNQITLFHSGAMMRSYENHVRDVPGVTLGLVGPDGREGMIQNAEEFAAMGIPFIFDPGQAVPLFSGPELREFIEQADYVVVNDYESRLLQARTGWNEQDIVSRVQAYITTQGSAGAVVMTPEKRYVIPAAKASRVVDPTGCGDAFRAGLIYGIQHEYDWLTIGRMGNLMGALKVEHPGGQNQRFTFAEFNDRFKQYFGYAL

SEQ ID NO: 1943 - DNA, 963 bp, synthetic construct
  misc_feature 1..963: note = variant of adenosine kinase from Xanthemonas campestris
  source 1..963: mol_type = other DNA
atgcatcatcaccatcaccatggggggtccggtatgagtgcactcatttgcggttctttagcgtatgataacatcatgggttttccggactatttcaagaaccatattctgcccgatcgtgttcaccgcctcaatgtcagctttctggtatttgacatgcgtcgtgaatttggaggctgtgccggcaacattgcgtacaatctgcatctgttgggtggtcgcccgatcgtaatggctacggtgggccaagatttcggtccgtatcgcgaacacttcgaaactctgggcattgacttatcccgcgtcaagatcatcgatgatctgagtacaccgcaggggttcattaccaccgacatggatcaaaaccagattacgctgtttcacagcggcgcaatgatgcgttcgtacgaaaatcacgttcgtgatgtgccgggtgttaccttgggcctcgtaggtcctgatggccgcgagggcatgatccaaaatgccgaagaatttgctgctatgggcattccgttcatttttgacccaggtcaggcagtgcctctgttcagcggcccggaactgcgcgaatttatcgaacaggcggactatgtggtggtcaacgattacgaaagccgccttcttcaagcccgtactggctggaacgagcaggacattgttagccgcgtgcaggcgtatatcaccacgcaaggttcggctggagccgtggtaatgacaccggagaagcgctacgttattccggctgctaaaacttctcgtgtcgttgatccaactggttgcggcgacgcgtttcgcgccggcctgatctatggtattcagcatgaatatgattggttgaccattggccgcatgggaaacttaatgggtgcgctgaaagtggaacaccctggcggccaaaatcagcgtttcacctttgccgaattcaacgaccggttcaaacaatattttggctacgcgctc

SEQ ID NO: 1944 - protein, 321 aa, synthetic construct
  REGION 1..321: note = variant of adenosine kinase from Xanthemonas campestris
MHHHHHHGGSGMSALICGSLAYDNIMGFPDYFKNHILPDRVHRLNVSFLVFDMRREFGGCAGNIAYNLHLLGGRPIVMATVGQDFGPYREHFETLGIDLSRVKIIDDLSTPQGFITTDMDQNQITLFHSGAMMRSYENHVRDVPGVTLGLVGPDGREGMIQNAEEFAAMGIPFIFDPGQAVPLFSGPELREFIEQADYVVVNDYESRLLQARTGWNEQDIVSRVQAYITTQGSAGAVVMTPEKRYVIPAAKTSRVVDPTGCGDAFRAGLIYGIQHEYDWLTIGRMGNLMGALKVEHPGGQNQRFTFAEFNDRFKQYFGYAL

SEQ ID NO: 1945 - DNA, 963 bp, synthetic construct
  misc_feature 1..963: note = variant of adenosine kinase from Xanthemonas campestris
  source 1..963: mol_type = other DNA
atgcatcatcaccatcaccatggggggtccggtatgagtgcactcatttgcggttctttagcgtatgataacatcatgtggtttccggactatttcaagaacgagattctgcccgatcgtgttcaccgcctcaatgtcagctttctggtatttgacatgcgtcgtgaatttggaggctgtgccggcaacattgcgtacaatctgcatctgttgggtggtcgcccgatcgtaatggctacggtgggccaagatttcggtccgtatcgcgaacacttcgaaactctgggcattgacttatcccgcgtcaagatcatcgatgatctgagtacaccgcaggggttcattaccaccgacatggatcaaaaccagattacgctgtttcacagcggcgcaatgatgcgttcgtacgaaaatcacgttcgtgatgtgccgggtgttaccttgggcctcgtaggtcctgatggccgcgagggcatgatccaaaatgccgaagaatttgctgctatgggcattccgttcatttttgacccaggtcaggcagtgcctctgttcagcggcccggaactgcgcgaatttatcgaacaggcggactatgtggtggtcaacgattacgaaagccgccttcttcaagcccgtactggctggaacgagcaggacattgttagccgcgtgcaggcgtatatcaccacgcaaggttcggctggagccgtggtaatgacaccggagaagcgctacgttattccggctgctaaaacttctcgtgtcgttgatccaactggttgcggcgacgcgtttcgcgccggcctgatctatggtattcagcatgaatatgattggttgaccattggccgcatgggaaacttaatgggtgcgctgaaagtggaacaccctggcggccaaaatcagcgtttcacctttgccgaattcaacgaccggttcaaacaatattttggctacgcgctc

SEQ ID NO: 1946 - protein, 321 aa, synthetic construct
  REGION 1..321: note = variant of adenosine kinase from Xanthemonas campestris
MHHHHHHGGSGMSALICGSLAYDNIMWFPDYFKNEILPDRVHRLNVSFLVFDMRREFGGCAGNIAYNLHLLGGRPIVMATVGQDFGPYREHFETLGIDLSRVKIIDDLSTPQGFITTDMDQNQITLFHSGAMMRSYENHVRDVPGVTLGLVGPDGREGMIQNAEEFAAMGIPFIFDPGQAVPLFSGPELREFIEQADYVVVNDYESRLLQARTGWNEQDIVSRVQAYITTQGSAGAVVMTPEKRYVIPAAKTSRVVDPTGCGDAFRAGLIYGIQHEYDWLTIGRMGNLMGALKVEHPGGQNQRFTFAEFNDRFKQYFGYAL

SEQ ID NO: 1947 - DNA, 963 bp, synthetic construct
  misc_feature 1..963: note = variant of adenosine kinase from Xanthemonas campestris
  source 1..963: mol_type = other DNA
atgcatcatcaccatcaccatggggggtccggtatgagtgcactcatttgcggttctttagcgtatgataacatcatgtggttgccggactatttcaagaaccatattctgcccgatcgtgttcaccgcctcaatgtcagctttctggtatttgacatgcgtcgtgaatttggaggctgtgccggcaacattgcgtacaatctgcatctgttgggtggtcgcccgatcgtaatggctacggtgggccaagatttcggtccgtatcgcgaacacttcgaaactctgggcattgacttatcccgcgtcaagatcatcgatgatctgagtacaccgcaggggttcattaccaccgacatggatcaaaaccagattacgctgtttcacagcggcgcaatgatgcgttcgtacgaaaatcacgttcgtgatgtgccgggtgttaccttgggcctcgtaggtcctgatggccgcgagggcatgatccaaaatgccgaagaatttgctgctatgggcattccgttcatttttgacccaggtcaggcagtgcctctgttcagcggcccggaactgcgcgaatttatcgaacaggcggactatgtggtggtcaacgattacgaaagccgccttcttcaagcccgtactggctggaacgagcaggacattgttagccgcgtgcaggcgtatatcaccacgcaaggttcggctggagccgtggtaatgacaccggagaagcgctacgttattccggctgctaaaacttctcgtgtcgttgatccaactggttgcggcgacgcgtttcgcgccggcctgatctatggtattcagcatgaatatgattggttgaccattggccgcatgggaaacttaatgggtgcgctgaaagtggaacaccctggcggccaaaatcagcgtttcacctttgccgaattcaacgaccggttcaaacaatattttggctacgcgctc

SEQ ID NO: 1948 - protein, 321 aa, synthetic construct
  REGION 1..321: note = variant of adenosine kinase from Xanthemonas campestris
MHHHHHHGGSGMSALICGSLAYDNIMWLPDYFKNHILPDRVHRLNVSFLVFDMRREFGGCAGNIAYNLHLLGGRPIVMATVGQDFGPYREHFETLGIDLSRVKIIDDLSTPQGFITTDMDQNQITLFHSGAMMRSYENHVRDVPGVTLGLVGPDGREGMIQNAEEFAAMGIPFIFDPGQAVPLFSGPELREFIEQADYVVVNDYESRLLQARTGWNEQDIVSRVQAYITTQGSAGAVVMTPEKRYVIPAAKTSRVVDPTGCGDAFRAGLIYGIQHEYDWLTIGRMGNLMGALKVEHPGGQNQRFTFAEFNDRFKQYFGYAL

SEQ ID NO: 1949 - DNA, 963 bp, synthetic construct
  misc_feature 1..963: note = variant of adenosine kinase from Xanthemonas campestris
  source 1..963: mol_type = other DNA
atgcatcatcaccatcaccatggggggtccggtatgagtgcactcatttgcggttctttagcgtatgataacatcatgtgttttccggactatttcaagaaccatattctgcccgatcgtgttcaccgcctcaatgtcagctttctggtatttgacatgcgtcgtgaatttggaggctgtgccggcaacattgcgtacaatctgcatctgttgggtggtcgcccgatcgtaatggctacggtgggccaagatttcggtccgtatcgcgaacacttcgaaactctgggcattgacttatcccgcgtcaagatcatcgatgatctgagtacaccgcaggggttcattaccaccgacatggatcaaaaccagattacgctgtttcacagcggcgcaatgatgcgttcgtacgaaaatcacgttcgtgatgtgccgggtgttaccttgggcctcgtaggtcctgatggccgcgagggcatgatccaaaatgccgaagaatttgctgctatgggcattccgttcatttttgacccaggtcaggcagtgcctctgttcagcggcccggaactgcgcgaatttatcgaacaggcggactatgtggtggtcaacgattacgaaagccgccttcttcaagcccgtactggctggaacgagcaggacattgttagccgcgtgcaggcgtatatcaccacgcaaggttcggctggagccgtggtaatgacaccggagaagcgctacgttattccggctgctaaaacttctcgtgtcgttgatccaactggttgcggcgacgcgtttcgcgccggcctgatctatggtattcagcatgaatatgattggttgaccattggccgcatgggaaacttaatgggtgcgctgaaagtggaacaccctggcggccaaaatcagcgtttcacctttgccgaattcaacgaccggttcaaacaatattttggctacgcgctc

SEQ ID NO: 1950 - protein, 321 aa, synthetic construct
  REGION 1..321: note = variant of adenosine kinase from Xanthemonas campestris
MHHHHHHGGSGMSALICGSLAYDNIMCFPDYFKNHILPDRVHRLNVSFLVFDMRREFGGCAGNIAYNLHLLGGRPIVMATVGQDFGPYREHFETLGIDLSRVKIIDDLSTPQGFITTDMDQNQITLFHSGAMMRSYENHVRDVPGVTLGLVGPDGREGMIQNAEEFAAMGIPFIFDPGQAVPLFSGPELREFIEQADYVVVNDYESRLLQARTGWNEQDIVSRVQAYITTQGSAGAVVMTPEKRYVIPAAKTSRVVDPTGCGDAFRAGLIYGIQHEYDWLTIGRMGNLMGALKVEHPGGQNQRFTFAEFNDRFKQYFGYAL

SEQ ID NO: 1951 - DNA, 963 bp, synthetic construct
  misc_feature 1..963: note = variant of adenosine kinase from Xanthemonas campestris
  source 1..963: mol_type = other DNA
atgcatcatcaccatcaccatggggggtccggtatgagtgcactcatttgcggttctttagcgtatgataacatcatgtggtttccggactatttcaagaaccatattctgcccgatcgtgttcaccgcctcaatgtcagctttctggtatttgacatgcgtcgtgaatttggaggctgtgccggcaacattgcgtacaatctgcatctgttgggtggtcgcccgatcgtaatggctacggtgggccaagatttcggtccgtatcgcgaacacttcgaaactctgggcattgacttatcccgcgtcaagatcatcgatgatctgagtacaccgcaggggttcattaccaccgacatggatcaaaaccagattacgctgtttcacagcggcgcaatgatgcgttcgtacgaaaatcacgttcgtgatgtgccgggtgttaccttgggcctcgtaggtcctgatggccgcgagggcatgatccaaaatgccgaagaatttgctgctatgggcattccgttcatttttgacccaggtcaggcagtgcctctgttcagcggcccggaactgcgcgaatttatcgaacaggcggactatgtggtggtcaacgattacgaaagccgccttcttcaagcccgtactggctggaacgagcaggacattgttagccgcgtgcaggcgtatatcaccacgcaaggttcggctggagccgtggtaatgacaccggagaagcgctacgttattccggctgctaaaacttctcgtgtcgttgatccaactggttgcggcgacgcgtttcgcgccggcctgatctatggtattcagcatgaatatgattggttgaccattggccgcatgggaaacttaatgggtgcgctgaaagtggaacaccctggcggccaaaatcagcgtttcacctttgccgaattcaacgaccggttcaaacaaatttttggctacgcgctc

SEQ ID NO: 1952 - protein, 321 aa, synthetic construct
  REGION 1..321: note = variant of adenosine kinase from Xanthemonas campestris
MHHHHHHGGSGMSALICGSLAYDNIMWFPDYFKNHILPDRVHRLNVSFLVFDMRREFGGCAGNIAYNLHLLGGRPIVMATVGQDFGPYREHFETLGIDLSRVKIIDDLSTPQGFITTDMDQNQITLFHSGAMMRSYENHVRDVPGVTLGLVGPDGREGMIQNAEEFAAMGIPFIFDPGQAVPLFSGPELREFIEQADYVVVNDYESRLLQARTGWNEQDIVSRVQAYITTQGSAGAVVMTPEKRYVIPAAKTSRVVDPTGCGDAFRAGLIYGIQHEYDWLTIGRMGNLMGALKVEHPGGQNQRFTFAEFNDRFKQIFGYAL

SEQ ID NO: 1953 - DNA, 963 bp, synthetic construct
  misc_feature 1..963: note = variant of adenosine kinase from Xanthemonas campestris
  source 1..963: mol_type = other DNA
atgcatcatcaccatcaccatggggggtccggtatgagtgcactcatttgcggttctttagcgtatgataacatcatgtggatgccggactatttcaagaaccatattctgcccgatcgtgttcaccgcctcaatgtcagctttctggtatttgacatgcgtcgtgaatttggaggctgtgccggcaacattgcgtacaatctgcatctgttgggtggtcgcccgatcgtaatggctacggtgggccaagatttcggtccgtatcgcgaacacttcgaaactctgggcattgacttatcccgcgtcaagatcatcgatgatctgagtacaccgcaggggttcattaccaccgacatggatcaaaaccagattacgctgtttcacagcggcgcaatgatgcgttcgtacgaaaatcacgttcgtgatgtgccgggtgttaccttgggcctcgtaggtcctgatggccgcgagggcatgatccaaaatgccgaagaatttgctgctatgggcattccgttcatttttgacccaggtcaggcagtgcctctgttcagcggcccggaactgcgcgaatttatcgaacaggcggactatgtggtggtcaacgattacgaaagccgccttcttcaagcccgtactggctggaacgagcaggacattgttagccgcgtgcaggcgtatatcaccacgcaaggttcggctggagccgtggtaatgacaccggagaagcgctacgttattccggctgctaaaacttctcgtgtcgttgatccaactggttgcggcgacgcgtttcgcgccggcctgatctatggtattcagcatgaatatgattggttgaccattggccgcatgggaaacttaatgggtgcgctgaaagtggaacaccctggcggccaaaatcagcgtttcacctttgccgaattcaacgaccggttcaaacaatattttggctacgcgctc

SEQ ID NO: 1954 - protein, 321 aa, synthetic construct
  REGION 1..321: note = variant of adenosine kinase from Xanthemonas campestris
MHHHHHHGGSGMSALICGSLAYDNIMWMPDYFKNHILPDRVHRLNVSFLVFDMRREFGGCAGNIAYNLHLLGGRPIVMATVGQDFGPYREHFETLGIDLSRVKIIDDLSTPQGFITTDMDQNQITLFHSGAMMRSYENHVRDVPGVTLGLVGPDGREGMIQNAEEFAAMGIPFIFDPGQAVPLFSGPELREFIEQADYVVVNDYESRLLQARTGWNEQDIVSRVQAYITTQGSAGAVVMTPEKRYVIPAAKTSRVVDPTGCGDAFRAGLIYGIQHEYDWLTIGRMGNLMGALKVEHPGGQNQRFTFAEFNDRFKQYFGYAL

SEQ ID NO: 1955 - DNA, 963 bp, synthetic construct
  misc_feature 1..963: note = variant of adenosine kinase from Xanthemonas campestris
  source 1..963: mol_type = other DNA
atgcatcatcaccatcaccatggggggtccggtatgagtgcactcatttgcggttctttagcgtatgataacatcatgtggtttccggactatttcaagaaccatattctgcccgatcgtgttcaccgcctcaatgtcagctttctggtatttgacatgcgtcgtgaatttggaggctgtgccggcaacattgcgtacaatctgcatctgttgggtggtcgcccgatcgtaatggctacggtgggccaagatttcggtccgtatcgcgaacacttcgaaactctgggcattgacttatcccgcgtcaagatcatcgatgatctgagtacaccgcaggggttcattaccaccgacatggatcaaaaccagattacgctgtttcacagcggcgcaatgatgcgttcgtacgaaaatcacgttcgtgatgtgccgggtgttaccttgggcctcgtaggtcctgatggccgcgagggcatgatccaaaatgccgaagaatttgctgctatgggcattccgttcatttttgacccaggtcaggcagtgcctctgttcagcggcccggaactgcgcgaatttatcgaacaggcggactatgtggtggtcaacgattacgaaagccgccttcttcaagcccgtactggctggaacgagagggacattgttagccgcgtgcaggcgtatatcaccacgcaaggttcggctggagccgtggtaatgacaccggagaagcgctacgttattccggctgctaaaacttctcgtgtcgttgatccaactggttgcggcgacgcgtttcgcgccggcctgatctatggtattcagcatgaatatgattggttgaccattggccgcatgggaaacttaatgggtgcgctgaaagtggaacaccctggcggccaaaatcagcgtttcacctttgccgaattcaacgaccggttcaaacaatattttggctacgcgctc

SEQ ID NO: 1956 - protein, 321 aa, synthetic construct
  REGION 1..321: note = variant of adenosine kinase from Xanthemonas campestris
MHHHHHHGGSGMSALICGSLAYDNIMWFPDYFKNHILPDRVHRLNVSFLVFDMRREFGGCAGNIAYNLHLLGGRPIVMATVGQDFGPYREHFETLGIDLSRVKIIDDLSTPQGFITTDMDQNQITLFHSGAMMRSYENHVRDVPGVTLGLVGPDGREGMIQNAEEFAAMGIPFIFDPGQAVPLFSGPELREFIEQADYVVVNDYESRLLQARTGWNERDIVSRVQAYITTQGSAGAVVMTPEKRYVIPAAKTSRVVDPTGCGDAFRAGLIYGIQHEYDWLTIGRMGNLMGALKVEHPGGQNQRFTFAEFNDRFKQYFGYAL

SEQ ID NO: 1957 - DNA, 963 bp, synthetic construct
  misc_feature 1..963: note = variant of adenosine kinase from Xanthemonas campestris
  source 1..963: mol_type = other DNA
atgcatcatcaccatcaccatggggggtccggtatgagtgcactcatttgcggttctttagcgtatgataacatcatgtggtttccggactatttcaagaacgatattctgcccgatcgtgttcaccgcctcaatgtcagctttctggtatttgacatgcgtcgtgaatttggaggctgtgccggcaacattgcgtacaatctgcatctgttgggtggtcgcccgatcgtaatggctacggtgggccaagatttcggtccgtatcgcgaacacttcgaaactctgggcattgacttatcccgcgtcaagatcatcgatgatctgagtacaccgcaggggttcattaccaccgacatggatcaaaaccagattacgctgtttcacagcggcgcaatgatgcgttcgtacgaaaatcacgttcgtgatgtgccgggtgttaccttgggcctcgtaggtcctgatggccgcgagggcatgatccaaaatgccgaagaatttgctgctatgggcattccgttcatttttgacccaggtcaggcagtgcctctgttcagcggcccggaactgcgcgaatttatcgaacaggcggactatgtggtggtcaacgattacgaaagccgccttcttcaagcccgtactggctggaacgagcaggacattgttagccgcgtgcaggcgtatatcaccacgcaaggttcggctggagccgtggtaatgacaccggagaagcgctacgttattccggctgctaaaacttctcgtgtcgttgatccaactggttgcggcgacgcgtttcgcgccggcctgatctatggtattcagcatgaatatgattggttgaccattggccgcatgggaaacttaatgggtgcgctgaaagtggaacaccctggcggccaaaatcagcgtttcacctttgccgaattcaacgaccggttcaaacaatattttggctacgcgctc

SEQ ID NO: 1958 - protein, 321 aa, synthetic construct
  REGION 1..321: note = variant of adenosine kinase from Xanthemonas campestris
MHHHHHHGGSGMSALICGSLAYDNIMWFPDYFKNDILPDRVHRLNVSFLVFDMRREFGGCAGNIAYNLHLLGGRPIVMATVGQDFGPYREHFETLGIDLSRVKIIDDLSTPQGFITTDMDQNQITLFHSGAMMRSYENHVRDVPGVTLGLVGPDGREGMIQNAEEFAAMGIPFIFDPGQAVPLFSGPELREFIEQADYVVVNDYESRLLQARTGWNEQDIVSRVQAYITTQGSAGAVVMTPEKRYVIPAAKTSRVVDPTGCGDAFRAGLIYGIQHEYDWLTIGRMGNLMGALKVEHPGGQNQRFTFAEFNDRFKQYFGYAL

SEQ ID NO: 1959 - DNA, 963 bp, synthetic construct
  misc_feature 1..963: note = variant of adenosine kinase from Xanthemonas campestris
  source 1..963: mol_type = other DNA
atgcatcatcaccatcaccatggggggtccggtatgagtgcactcatttgcggttctttagcgtatgataacatcatgtggtttccggactatttcaagaaccatattctgcccgatcgtgttcaccgcctcaatgtcagctttctggtatttgacatgcgtcgtgaatttggaggctgtgccggcaacattgcgtacaatctgcatctgttgggtggtcgcccgatcgtaatggctacggtgggccaagatttcggtccgtatcgcgaacacttcgaaactctgggcattgacttatcccgcgtcaagatcatcgatgatctgagtacaccgcaggggttcattaccaccgacatggatcaaaaccagattacgctgtttcacagcggcgcaatgatgcgttcgtacgaaaatcacgttcgtgatgtgccgggtgttaccttgggcctcgtaggtcctgatggccgcgagggcatgatccaaaatgccgaagaatttgctgctatgggcattccgttcatttttgacccaggtcaggcagtgcctctgttcagcggcccggaactgcgcgaatttatcgaacaggcggactatgtggtggtcaacgattacgaaagccgccttcttcaagcccgtactggctggaacgagcaggacattgttagccgcgtgcaggcgtatatcaccacgcaaggttcggctggagccgtggtacatacaccggagaagcgctacgttattccggctgctaaaacttctcgtgtcgttgatccaactggttgcggcgacgcgtttcgcgccggcctgatctatggtattcagcatgaatatgattggttgaccattggccgcatgggaaacttaatgggtgcgctgaaagtggaacaccctggcggccaaaatcagcgtttcacctttgccgaattcaacgaccggttcaaacaatattttggctacgcgctc

SEQ ID NO: 1960 - protein, 321 aa, synthetic construct
  REGION 1..321: note = variant of adenosine kinase from Xanthemonas campestris
MHHHHHHGGSGMSALICGSLAYDNIMWFPDYFKNHILPDRVHRLNVSFLVFDMRREFGGCAGNIAYNLHLLGGRPIVMATVGQDFGPYREHFETLGIDLSRVKIIDDLSTPQGFITTDMDQNQITLFHSGAMMRSYENHVRDVPGVTLGLVGPDGREGMIQNAEEFAAMGIPFIFDPGQAVPLFSGPELREFIEQADYVVVNDYESRLLQARTGWNEQDIVSRVQAYITTQGSAGAVVHTPEKRYVIPAAKTSRVVDPTGCGDAFRAGLIYGIQHEYDWLTIGRMGNLMGALKVEHPGGQNQRFTFAEFNDRFKQYFGYAL

SEQ ID NO: 1961 - DNA, 963 bp, synthetic construct
  misc_feature 1..963: note = variant of adenosine kinase from Xanthemonas campestris
  source 1..963: mol_type = other DNA
atgcatcatcaccatcaccatggggggtccggtatgagtgcactcatttgcggttctttagcgtatgataacatcatgtggtttccggactatttcaagaaccatattctgcccgatcgtgttcaccgcctcaatgtcagctttctggtatttgacatgcgtcgtgaatttggaggctgtgccggcaacattgcgtacaatctgcatctgttgggtggtcgcccgatcgtaatggctacggtgggccaagatttcggtccgtatcgcgaacacttcgaaactctgggcattgacttatcccgcgtcaagatcatcgatgatctgagtacaccgcaggggttcattaccaccgacatggatcaaaaccagattacgctgtttcacagcggcgcaatgatgcgttcgtacgaaaatcacgttcgtgatgtgccgggtgttaccttgggcctcgtaggtcctgatggccgcgagggcatgatccaaaatgccgaagaatttgctgctatgggcattccgttcatttttgacccaggtcaggcagtgcctctgttcagcggcccggaactgcgcgaatttatcgaacaggcggactatgtggtggtcaacgattacgaaagccgccttcttcaagcccgtactggctggaacgagcaggacattgttagccgcgtgcaggcgtatatcaccacgcaaggttcggctggagccgtggtaatgacaccggagaagcgccaggttattccggctgctaaaacttctcgtgtcgttgatccaactggttgcggcgacgcgtttcgcgccggcctgatctatggtattcagcatgaatatgattggttgaccattggccgcatgggaaacttaatgggtgcgctgaaagtggaacaccctggcggccaaaatcagcgtttcacctttgccgaattcaacgaccggttcaaacaatattttggctacgcgctc

SEQ ID NO: 1962 - protein, 321 aa, synthetic construct
  REGION 1..321: note = variant of adenosine kinase from Xanthemonas campestris
MHHHHHHGGSGMSALICGSLAYDNIMWFPDYFKNHILPDRVHRLNVSFLVFDMRREFGGCAGNIAYNLHLLGGRPIVMATVGQDFGPYREHFETLGIDLSRVKIIDDLSTPQGFITTDMDQNQITLFHSGAMMRSYENHVRDVPGVTLGLVGPDGREGMIQNAEEFAAMGIPFIFDPGQAVPLFSGPELREFIEQADYVVVNDYESRLLQARTGWNEQDIVSRVQAYITTQGSAGAVVMTPEKRQVIPAAKTSRVVDPTGCGDAFRAGLIYGIQHEYDWLTIGRMGNLMGALKVEHPGGQNQRFTFAEFNDRFKQYFGYAL

SEQ ID NO: 1963 - DNA, 963 bp, synthetic construct
  misc_feature 1..963: note = variant of adenosine kinase from Xanthemonas campestris
  source 1..963: mol_type = other DNA
atgcatcatcaccatcaccatggggggtccggtatgagtgcactcatttgcggttctttagcgtatgataacatcatgtggtttccggaccatttcaagaaccatattctgcccgatcgtgttcaccgcctcaatgtcagctttctggtatttgacatgcgtcgtgaatttggaggctgtgccggcaacattgcgtacaatctgcatctgttgggtggtcgcccgatcgtaatggctacggtgggccaagatttcggtccgtatcgcgaacacttcgaaactctgggcattgacttatcccgcgtcaagatcatcgatgatctgagtacaccgcaggggttcattaccaccgacatggatcaaaaccagattacgctgtttcacagcggcgcaatgatgcgttcgtacgaaaatcacgttcgtgatgtgccgggtgttaccttgggcctcgtaggtcctgatggccgcgagggcatgatccaaaatgccgaagaatttgctgctatgggcattccgttcatttttgacccaggtcaggcagtgcctctgttcagcggcccggaactgcgcgaatttatcgaacaggcggactatgtggtggtcaacgattacgaaagccgccttcttcaagcccgtactggctggaacgagcaggacattgttagccgcgtgcaggcgtatatcaccacgcaaggttcggctggagccgtggtaatgacaccggagaagcgctacgttattccggctgctaaaacttctcgtgtcgttgatccaactggttgcggcgacgcgtttcgcgccggcctgatctatggtattcagcatgaatatgattggttgaccattggccgcatgggaaacttaatgggtgcgctgaaagtggaacaccctggcggccaaaatcagcgtttcacctttgccgaattcaacgaccggttcaaacaatattttggctacgcgctc

SEQ ID NO: 1964 - protein, 321 aa, synthetic construct
  REGION 1..321: note = variant of adenosine kinase from Xanthemonas campestris
MHHHHHHGGSGMSALICGSLAYDNIMWFPDHFKNHILPDRVHRLNVSFLVFDMRREFGGCAGNIAYNLHLLGGRPIVMATVGQDFGPYREHFETLGIDLSRVKIIDDLSTPQGFITTDMDQNQITLFHSGAMMRSYENHVRDVPGVTLGLVGPDGREGMIQNAEEFAAMGIPFIFDPGQAVPLFSGPELREFIEQADYVVVNDYESRLLQARTGWNEQDIVSRVQAYITTQGSAGAVVMTPEKRYVIPAAKTSRVVDPTGCGDAFRAGLIYGIQHEYDWLTIGRMGNLMGALKVEHPGGQNQRFTFAEFNDRFKQYFGYAL

SEQ ID NO: 1965 - DNA, 963 bp, synthetic construct
  misc_feature 1..963: note = variant of adenosine kinase from Xanthemonas campestris
  source 1..963: mol_type = other DNA
atgcatcatcaccatcaccatggggggtccggtatgagtgcactcatttgcggttctttagcgtatgataacatcatgtggtttccggactatttcaagaaccatattctgcccgatcgtgttcaccgcctcaatgtcagctttctggtatttgacatgcgtcgtgaatttggaggctgtgccggcaacattgcgtacaatctgcatctgttgggtggtcgcccgatcgtaatggctacggtgggccaagatttcggtccgtatcgcgaacacttcgaaactctgggcattgacttatcccgcgtcaagatcatcgatgatctgagtacaccgcaggggttcattaccaccgacatggatcaaaaccagattacgctgtttcacagcggcgcaatgatgcgttcgtacgaaaatcacgttcgtgatgtgccgggtgttaccttgggcctcgtaggtcctgatggccgcgagggcatgatccaaaatgccgaagaatttgctgctatgggcattccgttcatttttgacccaggtcaggcagtgcctctgttcagcggcccggaactgcgcgaatttatcgaacaggcggactatgtggtggtcaacgattacgaaagccgccttcttcaagcccgtactggctggaacgagcaggacattgttagccgcgtgcaggcgtatatcaccacgcaaggttcggctggagccgtggtagctacaccggagaagcgctacgttattccggctgctaaaacttctcgtgtcgttgatccaactggttgcggcgacgcgtttcgcgccggcctgatctatggtattcagcatgaatatgattggttgaccattggccgcatgggaaacttaatgggtgcgctgaaagtggaacaccctggcggccaaaatcagcgtttcacctttgccgaattcaacgaccggttcaaacaatattttggctacgcgctc

SEQ ID NO: 1966 - protein, 321 aa, synthetic construct
  REGION 1..321: note = variant of adenosine kinase from Xanthemonas campestris
MHHHHHHGGSGMSALICGSLAYDNIMWFPDYFKNHILPDRVHRLNVSFLVFDMRREFGGCAGNIAYNLHLLGGRPIVMATVGQDFGPYREHFETLGIDLSRVKIIDDLSTPQGFITTDMDQNQITLFHSGAMMRSYENHVRDVPGVTLGLVGPDGREGMIQNAEEFAAMGIPFIFDPGQAVPLFSGPELREFIEQADYVVVNDYESRLLQARTGWNEQDIVSRVQAYITTQGSAGAVVATPEKRYVIPAAKTSRVVDPTGCGDAFRAGLIYGIQHEYDWLTIGRMGNLMGALKVEHPGGQNQRFTFAEFNDRFKQYFGYAL

SEQ ID NO: 1967 - DNA, 963 bp, synthetic construct
  misc_feature 1..963: note = variant of adenosine kinase from Xanthemonas campestris
  source 1..963: mol_type = other DNA
atgcatcatcaccatcaccatggggggtccggtatgagtgcactcatttgcggttctttagcgtatgataacatcatgtggtttccggactatttcaagaaccatattctgcccgatcgtgttcaccgcctcaatgtcagctttctggtatttgacatgcgtcgtgaatttggaggctgtgccggcaacattgcgtacaatctgcatctgttgggtggtcgcccgatcgtaatggctacggtgggccaagatttcggtccgtatcgcgaacacttcgaaactctgggcattgacttatcccgcgtcaagatcatcgatgatctgagtacaccgcaggggttcattaccaccgacatggatcaaaaccagattacgctgtttcacagcggcgcaatgatgcgttcgtacgaaaatcacgttcgtgatgtgccgggtgttaccttgggcctcgtaggtcctgatggccgcgagggcatgatccaaaatgccgaagaatttgctgctatgggcattccgttcatttttgacccaggtcaggcagtgcctctgttcagcggcccggaactgcgcgaatttatcgaacaggcggactatgtggtggtcaacgattacgaaagccgccttcttcaagcccgtactggctggaacgagcaggacattgttagccgcgtgcaggcgtatatcaccacgcaaggttcggctggagccgtggtaacgacaccggagaagcgctacgttattccggctgctaaaacttctcgtgtcgttgatccaactggttgcggcgacgcgtttcgcgccggcctgatctatggtattcagcatgaatatgattggttgaccattggccgcatgggaaacttaatgggtgcgctgaaagtggaacaccctggcggccaaaatcagcgtttcacctttgccgaattcaacgaccggttcaaacaatattttggctacgcgctc

SEQ ID NO: 1968 - protein, 321 aa, synthetic construct
  REGION 1..321: note = variant of adenosine kinase from Xanthemonas campestris
MHHHHHHGGSGMSALICGSLAYDNIMWFPDYFKNHILPDRVHRLNVSFLVFDMRREFGGCAGNIAYNLHLLGGRPIVMATVGQDFGPYREHFETLGIDLSRVKIIDDLSTPQGFITTDMDQNQITLFHSGAMMRSYENHVRDVPGVTLGLVGPDGREGMIQNAEEFAAMGIPFIFDPGQAVPLFSGPELREFIEQADYVVVNDYESRLLQARTGWNEQDIVSRVQAYITTQGSAGAVVTTPEKRYVIPAAKTSRVVDPTGCGDAFRAGLIYGIQHEYDWLTIGRMGNLMGALKVEHPGGQNQRFTFAEFNDRFKQYFGYAL

SEQ ID NO: 1969 - DNA, 963 bp, synthetic construct
  misc_feature 1..963: note = variant of adenosine kinase from Xanthemonas campestris
  source 1..963: mol_type = other DNA
atgcatcatcaccatcaccatggggggtccggtatgagtgcactcatttgcggttctttagcgtatgataacatcatgtggtttccggactatttcaagaaccatattctgcccgatcgtgttaatcgcctcaatgtcagctttctggtatttgacatgcgtcgtgaatttggaggctgtgccggcaacattgcgtacaatctgcatctgttgggtggtcgcccgatcgtaatggctacggtgggccaagatttcggtccgtatcgcgaacacttcgaaactctgggcattgacttatcccgcgtcaagatcatcgatgatctgagtacaccgcaggggttcattaccaccgacatggatcaaaaccagattacgctgtttcacagcggcgcaatgatgcgttcgtacgaaaatcacgttcgtgatgtgccgggtgttaccttgggcctcgtaggtcctgatggccgcgagggcatgatccaaaatgccgaagaatttgctgctatgggcattccgttcatttttgacccaggtcaggcagtgcctctgttcagcggcccggaactgcgcgaatttatcgaacaggcggactatgtggtggtcaacgattacgaaagccgccttcttcaagcccgtactggctggaacgagcaggacattgttagccgcgtgcaggcgtatatcaccacgcaaggttcggctggagccgtggtaatgacaccggagaagcgctacgttattccggctgctaaaacttctcgtgtcgttgatccaactggttgcggcgacgcgtttcgcgccggcctgatctatggtattcagcatgaatatgattggttgaccattggccgcatgggaaacttaatgggtgcgctgaaagtggaacaccctggcggccaaaatcagcgtttcacctttgccgaattcaacgaccggttcaaacaatattttggctacgcgctc

SEQ ID NO: 1970 - protein, 321 aa, synthetic construct
  REGION 1..321: note = variant of adenosine kinase from Xanthemonas campestris
MHHHHHHGGSGMSALICGSLAYDNIMWFPDYFKNHILPDRVNRLNVSFLVFDMRREFGGCAGNIAYNLHLLGGRPIVMATVGQDFGPYREHFETLGIDLSRVKIIDDLSTPQGFITTDMDQNQITLFHSGAMMRSYENHVRDVPGVTLGLVGPDGREGMIQNAEEFAAMGIPFIFDPGQAVPLFSGPELREFIEQADYVVVNDYESRLLQARTGWNEQDIVSRVQAYITTQGSAGAVVMTPEKRYVIPAAKTSRVVDPTGCGDAFRAGLIYGIQHEYDWLTIGRMGNLMGALKVEHPGGQNQRFTFAEFNDRFKQYFGYAL

SEQ ID NO: 1971 - DNA, 963 bp, synthetic construct
  misc_feature 1..963: note = variant of adenosine kinase from Xanthemonas campestris
  source 1..963: mol_type = other DNA
atgcatcatcaccatcaccatggggggtccggtatgagtgcactcatttgcggttctttagcgtatgataacatcatgtggtttccggactatttcaagaaccatattctgcccgatcgtgttcaccgcctcaatgtcagctttctggtatttgacatgcgtcgtgaatttggaggctgtgccggcaacattgcgtacaatctgcatctgttgggtggtcgcccgatcgtaatggctacggtgggccaagatttcggtccgtatcgcgaacacttcgaaactctgggcattgacttatcccgcgtcaagatcatcgatgatctgagtacaccgcaggggttcattaccaccgacatggatcaaaaccagattacgctgtttcacagcggcgcaatgatgcgttcgtacgaaaatcacgttcgtgatgtgccgggtgttaccttgggcctcgtaggtcctgatggccgcgagggcatgatccaaaatgccgaagaatttgctgctatgggcattccgttcatttttgacccaggtcaggcagtgcctctgttcagcggcccggaactgcgcgaatttatcgaacaggcggactatgtggtggtcaacgattacgaaagccgccttcttcaagcccgtactggctggaacgagcaggacattgttagccgcgtgcaggcgtatatcaccacgcaaggttcggctggagccgtggtaattacaccggagaagcgctacgttattccggctgctaaaacttctcgtgtcgttgatccaactggttgcggcgacgcgtttcgcgccggcctgatctatggtattcagcatgaatatgattggttgaccattggccgcatgggaaacttaatgggtgcgctgaaagtggaacaccctggcggccaaaatcagcgtttcacctttgccgaattcaacgaccggttcaaacaatattttggctacgcgctc

SEQ ID NO: 1972 - protein, 321 aa, synthetic construct
  REGION 1..321: note = variant of adenosine kinase from Xanthemonas campestris
MHHHHHHGGSGMSALICGSLAYDNIMWFPDYFKNHILPDRVHRLNVSFLVFDMRREFGGCAGNIAYNLHLLGGRPIVMATVGQDFGPYREHFETLGIDLSRVKIIDDLSTPQGFITTDMDQNQITLFHSGAMMRSYENHVRDVPGVTLGLVGPDGREGMIQNAEEFAAMGIPFIFDPGQAVPLFSGPELREFIEQADYVVVNDYESRLLQARTGWNEQDIVSRVQAYITTQGSAGAVVITPEKRYVIPAAKTSRVVDPTGCGDAFRAGLIYGIQHEYDWLTIGRMGNLMGALKVEHPGGQNQRFTFAEFNDRFKQYFGYAL

SEQ ID NO: 1973 - DNA, 963 bp, synthetic construct
  misc_feature 1..963: note = variant of adenosine kinase from Xanthemonas campestris
  source 1..963: mol_type = other DNA
atgcatcatcaccatcaccatggggggtccggtatgagtgcactcatttgcggttctttagcgtatgataacatcatgtggtttccggactatttcaagaaccatattctgcccgatcgtgttcaccgcctcaatgtcagctttctggtatttgacatgcgtcgtgaatttggaggctgtgccggcaacattgcgtacaatctgcatctgttgggtggtcgcccgatcgtaatggctacggtgggccaagatttcggtccgtatcgcgaacacttcgaaactctgggcattgacttatcccgcgtcaagatcatcgatgatctgagtacaccgcaggggttcattaccaccgacatggatcaaaaccagattacgctgtttcacagcggcgcaatgatgcgttcgtacgaaaatcacgttcgtgatgtgccgggtgttaccttgggcctcgtaggtcctgatggccgcgagggcatgatccaaaatgccgaagaatttgctgctatgggcattccgttcatttttgacccaggtcaggcagtgcctctgttcagcggcccggaactgcgcgaatttatcgaacaggcggactatgtggtggtcaacgattacgaaagccgccttcttcaagcccgtactggctggaacgagcaggacattgttagccgcgtgcaggcgtatatcaccacgcaaggttcggctggagcccaggtaatgacaccggagaagcgctacgttattccggctgctaaaacttctcgtgtcgttgatccaactggttgcggcgacgcgtttcgcgccggcctgatctatggtattcagcatgaatatgattggttgaccattggccgcatgggaaacttaatgggtgcgctgaaagtggaacaccctggcggccaaaatcagcgtttcacctttgccgaattcaacgaccggttcaaacaatattttggctacgcgctc

SEQ ID NO: 1974 - protein, 321 aa, synthetic construct
  REGION 1..321: note = variant of adenosine kinase from Xanthemonas campestris
MHHHHHHGGSGMSALICGSLAYDNIMWFPDYFKNHILPDRVHRLNVSFLVFDMRREFGGCAGNIAYNLHLLGGRPIVMATVGQDFGPYREHFETLGIDLSRVKIIDDLSTPQGFITTDMDQNQITLFHSGAMMRSYENHVRDVPGVTLGLVGPDGREGMIQNAEEFAAMGIPFIFDPGQAVPLFSGPELREFIEQADYVVVNDYESRLLQARTGWNEQDIVSRVQAYITTQGSAGAQVMTPEKRYVIPAAKTSRVVDPTGCGDAFRAGLIYGIQHEYDWLTIGRMGNLMGALKVEHPGGQNQRFTFAEFNDRFKQYFGYAL

SEQ ID NO: 1975 - DNA, 963 bp, synthetic construct
  misc_feature 1..963: note = variant of adenosine kinase from Xanthemonas campestris
  source 1..963: mol_type = other DNA
atgcatcatcaccatcaccatggggggtccggtatgagtgcactcatttgcggttctttagcgtatgataacatcatgtggtttccggactatttcaagaaccatattctgcccgatcgtgttcaccgcctcaatgtcagctttctggtatttgacatgcgtcgtgaatttggaggctgtgccggcaacattgcgtacaatctgcatctgttgggtggtcgcccgatcgtaatggctacggtgggccaagatttcggtccgtatcgcgaacacttcgaaactctgggcattgacttatcccgcgtcaagatcatcgatgatctgagtacaccgcaggggttcattaccaccgacatggatcaaaaccagattacgctgtttcacagcggcgcaatgatgcgttcgtacgaaaatcacgttcgtgatgtgccgggtgttaccttgggcctcgtaggtcctgatggccgcgagggcatgatccaaaatgccgaagaatttgctgctatgggcattccgttcatttttgacccaggtcaggcagtgcctctgttcagcggcccggaactgcgcgaatttatcgaacaggcggactatgtggtggtcaacgattacgaaagccgccttcttcaagcccgtactggctggaacgagcaggacattgttagccgcgtgcaggcgtatatcaccacgcaaggttcggctggagccgtggtaatgacaccggagaagcgctacgttattccggctgctaaaacttctcgtgtcgttgatccaactggttgcggcgacgcgtttcgcgccggcctgatctatggtattcagcatgaatatgattggttgaccattggccgcatgggaaacttaatgggtgcgctgaaagtggaacaccctggcggccaaaatcagcgtttcacctttgccgaattcaacgaccggttcaaacaagcttttggctacgcgctc

SEQ ID NO: 1976 - protein, 321 aa, synthetic construct
  REGION 1..321: note = variant of adenosine kinase from Xanthemonas campestris
MHHHHHHGGSGMSALICGSLAYDNIMWFPDYFKNHILPDRVHRLNVSFLVFDMRREFGGCAGNIAYNLHLLGGRPIVMATVGQDFGPYREHFETLGIDLSRVKIIDDLSTPQGFITTDMDQNQITLFHSGAMMRSYENHVRDVPGVTLGLVGPDGREGMIQNAEEFAAMGIPFIFDPGQAVPLFSGPELREFIEQADYVVVNDYESRLLQARTGWNEQDIVSRVQAYITTQGSAGAVVMTPEKRYVIPAAKTSRVVDPTGCGDAFRAGLIYGIQHEYDWLTIGRMGNLMGALKVEHPGGQNQRFTFAEFNDRFKQAFGYAL

SEQ ID NO: 1977 - DNA, 963 bp, synthetic construct
  misc_feature 1..963: note = variant of adenosine kinase from Xanthemonas campestris
  source 1..963: mol_type = other DNA
atgcatcatcaccatcaccatggggggtccggtatgagtgcactcatttgcggttctttagcgtatgataacatcatgtggtttccggactatttcaagaaccatattctgcccgatcgtgttggtcgcctcaatgtcagctttctggtatttgacatgcgtcgtgaatttggaggctgtgccggcaacattgcgtacaatctgcatctgttgggtggtcgcccgatcgtaatggctacggtgggccaagatttcggtccgtatcgcgaacacttcgaaactctgggcattgacttatcccgcgtcaagatcatcgatgatctgagtacaccgcaggggttcattaccaccgacatggatcaaaaccagattacgctgtttcacagcggcgcaatgatgcgttcgtacgaaaatcacgttcgtgatgtgccgggtgttaccttgggcctcgtaggtcctgatggccgcgagggcatgatccaaaatgccgaagaatttgctgctatgggcattccgttcatttttgacccaggtcaggcagtgcctctgttcagcggcccggaactgcgcgaatttatcgaacaggcggactatgtggtggtcaacgattacgaaagccgccttcttcaagcccgtactggctggaacgagcaggacattgttagccgcgtgcaggcgtatatcaccacgcaaggttcggctggagccgtggtaatgacaccggagaagcgctacgttattccggctgctaaaacttctcgtgtcgttgatccaactggttgcggcgacgcgtttcgcgccggcctgatctatggtattcagcatgaatatgattggttgaccattggccgcatgggaaacttaatgggtgcgctgaaagtggaacaccctggcggccaaaatcagcgtttcacctttgccgaattcaacgaccggttcaaacaatattttggctacgcgctc

SEQ ID NO: 1978 - protein, 321 aa, synthetic construct
  REGION 1..321: note = variant of adenosine kinase from Xanthemonas campestris
MHHHHHHGGSGMSALICGSLAYDNIMWFPDYFKNHILPDRVGRLNVSFLVFDMRREFGGCAGNIAYNLHLLGGRPIVMATVGQDFGPYREHFETLGIDLSRVKIIDDLSTPQGFITTDMDQNQITLFHSGAMMRSYENHVRDVPGVTLGLVGPDGREGMIQNAEEFAAMGIPFIFDPGQAVPLFSGPELREFIEQADYVVVNDYESRLLQARTGWNEQDIVSRVQAYITTQGSAGAVVMTPEKRYVIPAAKTSRVVDPTGCGDAFRAGLIYGIQHEYDWLTIGRMGNLMGALKVEHPGGQNQRFTFAEFNDRFKQYFGYAL

SEQ ID NO: 1979 - DNA, 963 bp, synthetic construct
  misc_feature 1..963: note = variant of adenosine kinase from Xanthemonas campestris
  source 1..963: mol_type = other DNA
atgcatcatcaccatcaccatggggggtccggtatgagtgcactcatttgcggttctttagcgtatgataacatcttttggtttccggactatttcaagaaccatattctgcccgatcgtgttcaccgcctcaatgtcagctttctggtatttgacatgcgtcgtgaatttggaggctgtgccggcaacattgcgtacaatctgcatctgttgggtggtcgcccgatcgtaatggctacggtgggccaagatttcggtccgtatcgcgaacacttcgaaactctgggcattgacttatcccgcgtcaagatcatcgatgatctgagtacaccgcaggggttcattaccaccgacatggatcaaaaccagattacgctgtttcacagcggcgcaatgatgcgttcgtacgaaaatcacgttcgtgatgtgccgggtgttaccttgggcctcgtaggtcctgatggccgcgagggcatgatccaaaatgccgaagaatttgctgctatgggcattccgttcatttttgacccaggtcaggcagtgcctctgttcagcggcccggaactgcgcgaatttatcgaacaggcggactatgtggtggtcaacgattacgaaagccgccttcttcaagcccgtactggctggaacgagcaggacattgttagccgcgtgcaggcgtatatcaccacgcaaggttcggctggagccgtggtaatgacaccggagaagcgctacgttattccggctgctaaaacttctcgtgtcgttgatccaactggttgcggcgacgcgtttcgcgccggcctgatctatggtattcagcatgaatatgattggttgaccattggccgcatgggaaacttaatgggtgcgctgaaagtggaacaccctggcggccaaaatcagcgtttcacctttgccgaattcaacgaccggttcaaacaatattttggctacgcgctc

SEQ ID NO: 1980 - protein, 321 aa, synthetic construct
  REGION 1..321: note = variant of adenosine kinase from Xanthemonas campestris
MHHHHHHGGSGMSALICGSLAYDNIFWFPDYFKNHILPDRVHRLNVSFLVFDMRREFGGCAGNIAYNLHLLGGRPIVMATVGQDFGPYREHFETLGIDLSRVKIIDDLSTPQGFITTDMDQNQITLFHSGAMMRSYENHVRDVPGVTLGLVGPDGREGMIQNAEEFAAMGIPFIFDPGQAVPLFSGPELREFIEQADYVVVNDYESRLLQARTGWNEQDIVSRVQAYITTQGSAGAVVMTPEKRYVIPAAKTSRVVDPTGCGDAFRAGLIYGIQHEYDWLTIGRMGNLMGALKVEHPGGQNQRFTFAEFNDRFKQYFGYAL

SEQ ID NO: 1981 - DNA, 963 bp, synthetic construct
  misc_feature 1..963: note = variant of adenosine kinase from Xanthemonas campestris
  source 1..963: mol_type = other DNA
atgcatcatcaccatcaccatggggggtccggtatgagtgcactcatttgcggttctttagcgtatgataacatcatgtggtttccggactatttcaagaaccatattctgcccgatcgtgttcaccgcctcaatgtcagctttctggtatttgacatgcgtcgtgaatttggaggctgtgccggcaacattgcgtacaatctgcatctgttgggtggtcgcccgatcgtaatggctacggtgggccaagatttcggtccgtatcgcgaacacttcgaaactctgggcattgacttatcccgcgtcaagatcatcgatgatctgagtacaccgcaggggttcattaccaccgacatggatcaaaaccagattacgctgtttcacagcggcgcaatgatgcgttcgtacgaaaatcacgttcgtgatgtgccgggtgttaccttgggcctcgtaggtcctgatggccgcgagggcatgatccaaaatgccgaagaatttgctgctatgggcattccgttcatttttgacccaggtcaggcagtgcctctgttcagcggcccggaactgcgcgaatttatcgaacaggcggactatgtggtggtcaacgattacgaaagccgccttcttcaagccgcgactggctggaacgagcaggacattgttagccgcgtgcaggcgtatatcaccacgcaaggttcggctggagccgtggtaatgacaccggagaagcgctacgttattccggctgctaaaacttctcgtgtcgttgatccaactggttgcggcgacgcgtttcgcgccggcctgatctatggtattcagcatgaatatgattggttgaccattggccgcatgggaaacttaatgggtgcgctgaaagtggaacaccctggcggccaaaatcagcgtttcacctttgccgaattcaacgaccggttcaaacaatattttggctacgcgctc

SEQ ID NO: 1982 - protein, 321 aa, synthetic construct
  REGION 1..321: note = variant of adenosine kinase from Xanthemonas campestris
MHHHHHHGGSGMSALICGSLAYDNIMWFPDYFKNHILPDRVHRLNVSFLVFDMRREFGGCAGNIAYNLHLLGGRPIVMATVGQDFGPYREHFETLGIDLSRVKIIDDLSTPQGFITTDMDQNQITLFHSGAMMRSYENHVRDVPGVTLGLVGPDGREGMIQNAEEFAAMGIPFIFDPGQAVPLFSGPELREFIEQADYVVVNDYESRLLQAATGWNEQDIVSRVQAYITTQGSAGAVVMTPEKRYVIPAAKTSRVVDPTGCGDAFRAGLIYGIQHEYDWLTIGRMGNLMGALKVEHPGGQNQRFTFAEFNDRFKQYFGYAL

SEQ ID NO: 1983 - DNA, 963 bp, synthetic construct
  misc_feature 1..963: note = variant of adenosine kinase from Xanthemonas campestris
  source 1..963: mol_type = other DNA
atgcatcatcaccatcaccatggggggtccggtatgagtgcactcatttgcggttctttagcgtatgataacatcatgtggtttggtgactatttcaagaaccatattctgcccgatcgtgttcaccgcctcaatgtcagctttctggtatttgacatgcgtcgtgaatttggaggctgtgccggcaacattgcgtacaatctgcatctgttgggtggtcgcccgatcgtaatggctacggtgggccaagatttcggtccgtatcgcgaacacttcgaaactctgggcattgacttatcccgcgtcaagatcatcgatgatctgagtacaccgcaggggttcattaccaccgacatggatcaaaaccagattacgctgtttcacagcggcgcaatgatgcgttcgtacgaaaatcacgttcgtgatgtgccgggtgttaccttgggcctcgtaggtcctgatggccgcgagggcatgatccaaaatgccgaagaatttgctgctatgggcattccgttcatttttgacccaggtcaggcagtgcctctgttcagcggcccggaactgcgcgaatttatcgaacaggcggactatgtggtggtcaacgattacgaaagccgccttcttcaagcccgtactggctggaacgagcaggacattgttagccgcgtgcaggcgtatatcaccacgcaaggttcggctggagccgtggtaatgacaccggagaagcgctacgttattccggctgctaaaacttctcgtgtcgttgatccaactggttgcggcgacgcgtttcgcgccggcctgatctatggtattcagcatgaatatgattggttgaccattggccgcatgggaaacttaatgggtgcgctgaaagtggaacaccctggcggccaaaatcagcgtttcacctttgccgaattcaacgaccggttcaaacaatattttggctacgcgctc

SEQ ID NO: 1984 - protein, 321 aa, synthetic construct
  REGION 1..321: note = variant of adenosine kinase from Xanthemonas campestris
MHHHHHHGGSGMSALICGSLAYDNIMWFGDYFKNHILPDRVHRLNVSFLVFDMRREFGGCAGNIAYNLHLLGGRPIVMATVGQDFGPYREHFETLGIDLSRVKIIDDLSTPQGFITTDMDQNQITLFHSGAMMRSYENHVRDVPGVTLGLVGPDGREGMIQNAEEFAAMGIPFIFDPGQAVPLFSGPELREFIEQADYVVVNDYESRLLQARTGWNEQDIVSRVQAYITTQGSAGAVVMTPEKRYVIPAAKTSRVVDPTGCGDAFRAGLIYGIQHEYDWLTIGRMGNLMGALKVEHPGGQNQRFTFAEFNDRFKQYFGYAL

SEQ ID NO: 1985 - DNA, 963 bp, synthetic construct
  misc_feature 1..963: note = variant of adenosine kinase from Xanthemonas campestris
  source 1..963: mol_type = other DNA
atgcatcatcaccatcaccatggggggtccggtatgagtgcactcatttgcggttctttagcgtatgataacatcatgtggtttccggactatttcaagaaccatattctgcccgatcgtgttcaccgcctcaatgtcagctttctggtatttgacatgcgtcgtgaatttggaggctgtgccggcaacattgcgtacaatctgcatctgttgggtggtcgcccgatcgtaatggctacggtgggccaagatttcggtccgtatcgcgaacacttcgaaactctgggcattgacttatcccgcgtcaagatcatcgatgatctgagtacaccgcaggggttcattaccaccgacatggatcaaaaccagattacgctgtttcacagcggcgcaatgatgcgttcgtacgaaaatcacgttcgtgatgtgccgggtgttaccttgggcctcgtaggtcctgatggccgcgagggcatgatccaaaatgccgaagaatttgctgctatgggcattccgttcatttttgacccaggtcaggcagtgcctctgttcagcggcccggaactgcgcgaatttatcgaacaggcggactatgtggtggtcaacgattacgaaagccgccttcttcaagcccgtactggctggaacgagcaggacattgttagccgcgtgcaggcgtatatcaccacgcaaggttcggctggagccgtggtaatgacaccggagaagcgctacgctattccggctgctaaaacttctcgtgtcgttgatccaactggttgcggcgacgcgtttcgcgccggcctgatctatggtattcagcatgaatatgattggttgaccattggccgcatgggaaacttaatgggtgcgctgaaagtggaacaccctggcggccaaaatcagcgtttcacctttgccgaattcaacgaccggttcaaacaatattttggctacgcgctc

SEQ ID NO: 1986 - protein, 321 aa, synthetic construct
  REGION 1..321: note = variant of adenosine kinase from Xanthemonas campestris
MHHHHHHGGSGMSALICGSLAYDNIMWFPDYFKNHILPDRVHRLNVSFLVFDMRREFGGCAGNIAYNLHLLGGRPIVMATVGQDFGPYREHFETLGIDLSRVKIIDDLSTPQGFITTDMDQNQITLFHSGAMMRSYENHVRDVPGVTLGLVGPDGREGMIQNAEEFAAMGIPFIFDPGQAVPLFSGPELREFIEQADYVVVNDYESRLLQARTGWNEQDIVSRVQAYITTQGSAGAVVMTPEKRYAIPAAKTSRVVDPTGCGDAFRAGLIYGIQHEYDWLTIGRMGNLMGALKVEHPGGQNQRFTFAEFNDRFKQYFGYAL

SEQ ID NO: 1987 - DNA, 963 bp, synthetic construct
  misc_feature 1..963: note = variant of adenosine kinase from Xanthemonas campestris
  source 1..963: mol_type = other DNA
atgcatcatcaccatcaccatggggggtccggtatgagtgcactcatttgcggttctttagcgtatgataacatcatgtggtttccggactatttcaagaaccatattctgcccgatcgtgttcaccgcctcaatgtcagctttctggtatttgacatgcgtcgtgaatttggaggctgtgccggcaacattgcgtacaatctgcatctgttgggtggtcgcccgatcgtaatggctacggtgggccaagatttcggtccgtatcgcgaacacttcgaaactctgggcattgacttatcccgcgtcaagatcatcgatgatctgagtacaccgcaggggttcattaccaccgacatggatcaaaaccagattacgctgtttcacagcggcgcaatgatgcgttcgtacgaaaatcacgttcgtgatgtgccgggtgttaccttgggcctcgtaggtcctgatggccgcgagggcatgatccaaaatgccgaagaatttgctgctatgggcattccgttcatttttgacccaggtcaggcagtgcctctgttcagcggcccggaactgcgcgaatttatcgaacaggcggactatgtggtggtcaacgattacgaaagccgccttcttcaagcccgtactggctggaacgagcaggacattgttagccgcgtgcaggcgtatatcaccacgcaaggttcggctggagccaaggtaatgacaccggagaagcgctacgttattccggctgctaaaacttctcgtgtcgttgatccaactggttgcggcgacgcgtttcgcgccggcctgatctatggtattcagcatgaatatgattggttgaccattggccgcatgggaaacttaatgggtgcgctgaaagtggaacaccctggcggccaaaatcagcgtttcacctttgccgaattcaacgaccggttcaaacaatattttggctacgcgctc

SEQ ID NO: 1988 - protein, 321 aa, synthetic construct
  REGION 1..321: note = variant of adenosine kinase from Xanthemonas campestris
MHHHHHHGGSGMSALICGSLAYDNIMWFPDYFKNHILPDRVHRLNVSFLVFDMRREFGGCAGNIAYNLHLLGGRPIVMATVGQDFGPYREHFETLGIDLSRVKIIDDLSTPQGFITTDMDQNQITLFHSGAMMRSYENHVRDVPGVTLGLVGPDGREGMIQNAEEFAAMGIPFIFDPGQAVPLFSGPELREFIEQADYVVVNDYESRLLQARTGWNEQDIVSRVQAYITTQGSAGAKVMTPEKRYVIPAAKTSRVVDPTGCGDAFRAGLIYGIQHEYDWLTIGRMGNLMGALKVEHPGGQNQRFTFAEFNDRFKQYFGYAL

SEQ ID NO: 1989 - DNA, 963 bp, synthetic construct
  misc_feature 1..963: note = variant of adenosine kinase from Xanthemonas campestris
  source 1..963: mol_type = other DNA
atgcatcatcaccatcaccatggggggtccggtatgagtgcactcatttgcggttctttagcgtatgataacatcatgtggtttccggactatttcaagaaccatattctgcccgatcgtgttcaccgcctcaatgtcagctttctggtatttgacatgcgtcgtgaatttggaggctgtgccggcaacattgcgtacaatctgcatctgttgggtggtcgcccgatcgtaatggctacggtgggccaagatttcggtccgtatcgcgaacacttcgaaactctgggcattgacttatcccgcgtcaagatcatcgatgatctgagtacaccgcaggggttcattaccaccgacatggatcaaaaccagattacgctgtttcacagcggcgcaatgatgcgttcgtacgaaaatcacgttcgtgatgtgccgggtgttaccttgggcctcgtaggtcctgatggccgcgagggcatgatccaaaatgccgaagaatttgctgctatgggcattccgttcatttttgacccaggtcaggcagtgcctctgttcagcggcccggaactgcgcgaatttatcgaacaggcggactatgtggtggtcaacgattacgaaagccgccttcttcaagcccgtactggctggaacgagcaggacattgttagccgcgtgcaggcgtatatcaccacgcaaggttcggctggagccgtggtagggacaccggagaagcgctacgttattccggctgctaaaacttctcgtgtcgttgatccaactggttgcggcgacgcgtttcgcgccggcctgatctatggtattcagcatgaatatgattggttgaccattggccgcatgggaaacttaatgggtgcgctgaaagtggaacaccctggcggccaaaatcagcgtttcacctttgccgaattcaacgaccggttcaaacaatattttggctacgcgctc

SEQ ID NO: 1990 - protein, 321 aa, synthetic construct
  REGION 1..321: note = variant of adenosine kinase from Xanthemonas campestris
MHHHHHHGGSGMSALICGSLAYDNIMWFPDYFKNHILPDRVHRLNVSFLVFDMRREFGGCAGNIAYNLHLLGGRPIVMATVGQDFGPYREHFETLGIDLSRVKIIDDLSTPQGFITTDMDQNQITLFHSGAMMRSYENHVRDVPGVTLGLVGPDGREGMIQNAEEFAAMGIPFIFDPGQAVPLFSGPELREFIEQADYVVVNDYESRLLQARTGWNEQDIVSRVQAYITTQGSAGAVVGTPEKRYVIPAAKTSRVVDPTGCGDAFRAGLIYGIQHEYDWLTIGRMGNLMGALKVEHPGGQNQRFTFAEFNDRFKQYFGYAL

SEQ ID NO: 1991 - DNA, 963 bp, synthetic construct
  misc_feature 1..963: note = variant of adenosine kinase from Xanthemonas campestris
  source 1..963: mol_type = other DNA
atgcatcatcaccatcaccatggggggtccggtatgagtgcactcatttgcggttctttagcgtatgataacatcatgtggtttccggactatttcgctaaccatattctgcccgatcgtgttcaccgcctcaatgtcagctttctggtatttgacatgcgtcgtgaatttggaggctgtgccggcaacattgcgtacaatctgcatctgttgggtggtcgcccgatcgtaatggctacggtgggccaagatttcggtccgtatcgcgaacacttcgaaactctgggcattgacttatcccgcgtcaagatcatcgatgatctgagtacaccgcaggggttcattaccaccgacatggatcaaaaccagattacgctgtttcacagcggcgcaatgatgcgttcgtacgaaaatcacgttcgtgatgtgccgggtgttaccttgggcctcgtaggtcctgatggccgcgagggcatgatccaaaatgccgaagaatttgctgctatgggcattccgttcatttttgacccaggtcaggcagtgcctctgttcagcggcccggaactgcgcgaatttatcgaacaggcggactatgtggtggtcaacgattacgaaagccgccttcttcaagcccgtactggctggaacgagcaggacattgttagccgcgtgcaggcgtatatcaccacgcaaggttcggctggagccgtggtaatgacaccggagaagcgctacgttattccggctgctaaaacttctcgtgtcgttgatccaactggttgcggcgacgcgtttcgcgccggcctgatctatggtattcagcatgaatatgattggttgaccattggccgcatgggaaacttaatgggtgcgctgaaagtggaacaccctggcggccaaaatcagcgtttcacctttgccgaattcaacgaccggttcaaacaatattttggctacgcgctc

SEQ ID NO: 1992 - protein, 321 aa, synthetic construct
  REGION 1..321: note = variant of adenosine kinase from Xanthemonas campestris
MHHHHHHGGSGMSALICGSLAYDNIMWFPDYFANHILPDRVHRLNVSFLVFDMRREFGGCAGNIAYNLHLLGGRPIVMATVGQDFGPYREHFETLGIDLSRVKIIDDLSTPQGFITTDMDQNQITLFHSGAMMRSYENHVRDVPGVTLGLVGPDGREGMIQNAEEFAAMGIPFIFDPGQAVPLFSGPELREFIEQADYVVVNDYESRLLQARTGWNEQDIVSRVQAYITTQGSAGAVVMTPEKRYVIPAAKTSRVVDPTGCGDAFRAGLIYGIQHEYDWLTIGRMGNLMGALKVEHPGGQNQRFTFAEFNDRFKQYFGYAL

SEQ ID NO: 1993 - DNA, 963 bp, synthetic construct
  misc_feature 1..963: note = variant of adenosine kinase from Xanthemonas campestris
  source 1..963: mol_type = other DNA
atgcatcatcaccatcaccatggggggtccggtatgagtgcactcatttgcggttctttagcgtatgataacatcatgtggtttccggactatttcaagaaccatattctgcccgatcgtgttcagcgcctcaatgtcagctttctggtatttgacatgcgtcgtgaatttggaggctgtgccggcaacattgcgtacaatctgcatctgttgggtggtcgcccgatcgtaatggctacggtgggccaagatttcggtccgtatcgcgaacacttcgaaactctgggcattgacttatcccgcgtcaagatcatcgatgatctgagtacaccgcaggggttcattaccaccgacatggatcaaaaccagattacgctgtttcacagcggcgcaatgatgcgttcgtacgaaaatcacgttcgtgatgtgccgggtgttaccttgggcctcgtaggtcctgatggccgcgagggcatgatccaaaatgccgaagaatttgctgctatgggcattccgttcatttttgacccaggtcaggcagtgcctctgttcagcggcccggaactgcgcgaatttatcgaacaggcggactatgtggtggtcaacgattacgaaagccgccttcttcaagcccgtactggctggaacgagcaggacattgttagccgcgtgcaggcgtatatcaccacgcaaggttcggctggagccgtggtaatgacaccggagaagcgctacgttattccggctgctaaaacttctcgtgtcgttgatccaactggttgcggcgacgcgtttcgcgccggcctgatctatggtattcagcatgaatatgattggttgaccattggccgcatgggaaacttaatgggtgcgctgaaagtggaacaccctggcggccaaaatcagcgtttcacctttgccgaattcaacgaccggttcaaacaatattttggctacgcgctc

SEQ ID NO: 1994 - protein, 321 aa, synthetic construct
  REGION 1..321: note = variant of adenosine kinase from Xanthemonas campestris
MHHHHHHGGSGMSALICGSLAYDNIMWFPDYFKNHILPDRVQRLNVSFLVFDMRREFGGCAGNIAYNLHLLGGRPIVMATVGQDFGPYREHFETLGIDLSRVKIIDDLSTPQGFITTDMDQNQITLFHSGAMMRSYENHVRDVPGVTLGLVGPDGREGMIQNAEEFAAMGIPFIFDPGQAVPLFSGPELREFIEQADYVVVNDYESRLLQARTGWNEQDIVSRVQAYITTQGSAGAVVMTPEKRYVIPAAKTSRVVDPTGCGDAFRAGLIYGIQHEYDWLTIGRMGNLMGALKVEHPGGQNQRFTFAEFNDRFKQYFGYAL

SEQ ID NO: 1995 - DNA, 963 bp, synthetic construct
  misc_feature 1..963: note = variant of adenosine kinase from Xanthemonas campestris
  source 1..963: mol_type = other DNA
atgcatcatcaccatcaccatggggggtccggtatgagtgcactcatttgcggttctttagcgtatgataacatcatgtggtttccggactatttccctaaccatattctgcccgatcgtgttcaccgcctcaatgtcagctttctggtatttgacatgcgtcgtgaatttggaggctgtgccggcaacattgcgtacaatctgcatctgttgggtggtcgcccgatcgtaatggctacggtgggccaagatttcggtccgtatcgcgaacacttcgaaactctgggcattgacttatcccgcgtcaagatcatcgatgatctgagtacaccgcaggggttcattaccaccgacatggatcaaaaccagattacgctgtttcacagcggcgcaatgatgcgttcgtacgaaaatcacgttcgtgatgtgccgggtgttaccttgggcctcgtaggtcctgatggccgcgagggcatgatccaaaatgccgaagaatttgctgctatgggcattccgttcatttttgacccaggtcaggcagtgcctctgttcagcggcccggaactgcgcgaatttatcgaacaggcggactatgtggtggtcaacgattacgaaagccgccttcttcaagcccgtactggctggaacgagcaggacattgttagccgcgtgcaggcgtatatcaccacgcaaggttcggctggagccgtggtaatgacaccggagaagcgctacgttattccggctgctaaaacttctcgtgtcgttgatccaactggttgcggcgacgcgtttcgcgccggcctgatctatggtattcagcatgaatatgattggttgaccattggccgcatgggaaacttaatgggtgcgctgaaagtggaacaccctggcggccaaaatcagcgtttcacctttgccgaattcaacgaccggttcaaacaatattttggctacgcgctc

SEQ ID NO: 1996 - protein, 321 aa, synthetic construct
  REGION 1..321: note = variant of adenosine kinase from Xanthemonas campestris
MHHHHHHGGSGMSALICGSLAYDNIMWFPDYFPNHILPDRVHRLNVSFLVFDMRREFGGCAGNIAYNLHLLGGRPIVMATVGQDFGPYREHFETLGIDLSRVKIIDDLSTPQGFITTDMDQNQITLFHSGAMMRSYENHVRDVPGVTLGLVGPDGREGMIQNAEEFAAMGIPFIFDPGQAVPLFSGPELREFIEQADYVVVNDYESRLLQARTGWNEQDIVSRVQAYITTQGSAGAVVMTPEKRYVIPAAKTSRVVDPTGCGDAFRAGLIYGIQHEYDWLTIGRMGNLMGALKVEHPGGQNQRFTFAEFNDRFKQYFGYAL

SEQ ID NO: 1997 - DNA, 963 bp, synthetic construct
  misc_feature 1..963: note = variant of adenosine kinase from Xanthemonas campestris
  source 1..963: mol_type = other DNA
atgcatcatcaccatcaccatggggggtccggtatgagtgcactcatttgcggttctttagcgtatgataacatcatgtggtttccggactatttcaagaaccatattctgcccgatcgtgttcaccgcctcaatgtcagctttctggtatttgacatgcgtcgtgaatttggaggctgtgccggcaacattgcgtacaatctgcatctgttgggtggtcgcccgatcgtaatggctacggtgggccaagatttcggtccgtatcgcgaacacttcgaaactctgggcattgacttatcccgcgtcaagatcatcgatgatctgagtacaccgcaggggttcattaccaccgacatggatcaaaaccagattacgctgtttcacagcggcgcaatgatgcgttcgtacgaaaatcacgttcgtgatgtgccgggtgttaccttgggcctcgtaggtcctgatggccgcgagggcatgatccaaaatgccgaagaatttgctgctatgggcattccgttcatttttgacccaggtcaggcagtgcctctgttcagcggcccggaactgcgcgaatttatcgaacaggcggactatgtggtggtcaacgattacgaaagccgccttcttcaagcccgtactggctggaacgagcaggacattgttagccgcgtgcaggcgtatatcaccacgcaaggttcggctggagccgtggtaatgacaccggagaagcgctacgttattccggctgctaaagggtctcgtgtcgttgatccaactggttgcggcgacgcgtttcgcgccggcctgatctatggtattcagcatgaatatgattggttgaccattggccgcatgggaaacttaatgggtgcgctgaaagtggaacaccctggcggccaaaatcagcgtttcacctttgccgaattcaacgaccggttcaaacaatattttggctacgcgctc

SEQ ID NO: 1998 - protein, 321 aa, synthetic construct
  REGION 1..321: note = variant of adenosine kinase from Xanthemonas campestris
MHHHHHHGGSGMSALICGSLAYDNIMWFPDYFKNHILPDRVHRLNVSFLVFDMRREFGGCAGNIAYNLHLLGGRPIVMATVGQDFGPYREHFETLGIDLSRVKIIDDLSTPQGFITTDMDQNQITLFHSGAMMRSYENHVRDVPGVTLGLVGPDGREGMIQNAEEFAAMGIPFIFDPGQAVPLFSGPELREFIEQADYVVVNDYESRLLQARTGWNEQDIVSRVQAYITTQGSAGAVVMTPEKRYVIPAAKGSRVVDPTGCGDAFRAGLIYGIQHEYDWLTIGRMGNLMGALKVEHPGGQNQRFTFAEFNDRFKQYFGYAL

SEQ ID NO: 1999 - DNA, 963 bp, synthetic construct
  misc_feature 1..963: note = variant of adenosine kinase from Xanthemonas campestris
  source 1..963: mol_type = other DNA
atgcatcatcaccatcaccatggggggtccggtatgagtgcactcatttgcggttctttagcgtatgataacatcatgtggtttccggactatttcaagaaccatattctgcccgatcgtgttcaccgcctcaatgtcagctttctggtatttgacatgcgtcgtgaatttggaggctgtgccggcaacattgcgtacaatctgcatctgttgggtggtcgcccgatcgtaatggctacggtgggccaagatttcggtccgtatcgcgaacacttcgaaactctgggcattgacttatcccgcgtcaagatcatcgatgatctgagtacaccgcaggggttcattaccaccgacatggatcaaaaccagattacgctgtttcacagcggcgcaatgatgcgttcgtacgaaaatcacgttcgtgatgtgccgggtgttaccttgggcctcgtaggtcctgatggccgcgagggcatgatccaaaatgccgaagaatttgctgctatgggcattccgttcatttttgacccaggtcaggcagtgcctctgttcagcggcccggaactgcgcgaatttatcgaacaggcggactatgtggtggtcaacgattacgaaagccgccttcttcaagcccgtactggctggaacgagcaggacattgttagccgcgtgcaggcgtatatcaccacgcaaggttcggctggagccctggtaatgacaccggagaagcgctacgttattccggctgctaaaacttctcgtgtcgttgatccaactggttgcggcgacgcgtttcgcgccggcctgatctatggtattcagcatgaatatgattggttgaccattggccgcatgggaaacttaatgggtgcgctgaaagtggaacaccctggcggccaaaatcagcgtttcacctttgccgaattcaacgaccggttcaaacaatattttggctacgcgctc

SEQ ID NO: 2000 - protein, 321 aa, synthetic construct
  REGION 1..321: note = variant of adenosine kinase from Xanthemonas campestris
MHHHHHHGGSGMSALICGSLAYDNIMWFPDYFKNHILPDRVHRLNVSFLVFDMRREFGGCAGNIAYNLHLLGGRPIVMATVGQDFGPYREHFETLGIDLSRVKIIDDLSTPQGFITTDMDQNQITLFHSGAMMRSYENHVRDVPGVTLGLVGPDGREGMIQNAEEFAAMGIPFIFDPGQAVPLFSGPELREFIEQADYVVVNDYESRLLQARTGWNEQDIVSRVQAYITTQGSAGALVMTPEKRYVIPAAKTSRVVDPTGCGDAFRAGLIYGIQHEYDWLTIGRMGNLMGALKVEHPGGQNQRFTFAEFNDRFKQYFGYAL

SEQ ID NO: 2001 - DNA, 963 bp, synthetic construct
  misc_feature 1..963: note = variant of adenosine kinase from Xanthemonas campestris
  source 1..963: mol_type = other DNA
atgcatcatcaccatcaccatggggggtccggtatgagtgcactcatttgcggttctttagcgtatgataacatcatgtggtttccggactatttcaagaaccatattctgcccgatcgtgttcaccgcctcaatgtcagctttctggtatttgacatgcgtcgtgaatttggaggctgtgccggcaacattgcgtacaatctgcatctgttgggtggtcgcccgatcgtaatggctacggtgggccaagatttcggtccgtatcgcgaacacttcgaaactctgggcattgacttatcccgcgtcaagatcatcgatgatctgagtacaccgcaggggttcattaccaccgacatggatcaaaaccagattacgctgtttcacagcggcgcaatgatgcgttcgtacgaaaatcacgttcgtgatgtgccgggtgttaccttgggcctcgtaggtcctgatggccgcgagggcatgatccaaaatgccgaagaatttgctgctatgggcattccgttcatttttgacccaggtcaggcagtgcctctgttcagcggcccggaactgcgcgaatttatcgaacaggcggactatgtggtggtcaacgattacgaaagccgccttcttcaagcccgtactggctggaacgagcaggacattgttagccgcgtgcaggcgtatatcaccacgcaaggttcggctggagccgtggtaatgacaccggagaagcgctacgttattccggctgctaaaacttctcgtgtcgttgatccaactggttgcggcgacgcgtttcgcgccggcctgatctatggtattcagcatgggtatgattggttgaccattggccgcatgggaaacttaatgggtgcgctgaaagtggaacaccctggcggccaaaatcagcgtttcacctttgccgaattcaacgaccggttcaaacaatattttggctacgcgctc

SEQ ID NO: 2002 - protein, 321 aa, synthetic construct
  REGION 1..321: note = variant of adenosine kinase from Xanthemonas campestris
MHHHHHHGGSGMSALICGSLAYDNIMWFPDYFKNHILPDRVHRLNVSFLVFDMRREFGGCAGNIAYNLHLLGGRPIVMATVGQDFGPYREHFETLGIDLSRVKIIDDLSTPQGFITTDMDQNQITLFHSGAMMRSYENHVRDVPGVTLGLVGPDGREGMIQNAEEFAAMGIPFIFDPGQAVPLFSGPELREFIEQADYVVVNDYESRLLQARTGWNEQDIVSRVQAYITTQGSAGAVVMTPEKRYVIPAAKTSRVVDPTGCGDAFRAGLIYGIQHGYDWLTIGRMGNLMGALKVEHPGGQNQRFTFAEFNDRFKQYFGYAL

SEQ ID NO: 2003 - DNA, 963 bp, synthetic construct
  misc_feature 1..963: note = variant of adenosine kinase from Xanthemonas campestris
  source 1..963: mol_type = other DNA
atgcatcatcaccatcaccatggggggtccggtatgagtgcactcatttgcggttctttagcgtatgataacatcatgtggtttccggactatttcaagaaccatattctgcccgatcgtgttcaccgcctcaatgtcagctttctggtatttgacatgcgtcgtgaatttggaggctgtgccggcaacattgcgtacaatctgcatctgttgggtggtcgcccgatcgtaatggctacggtgggccaagatttcggtccgtatcgcgaacacttcgaaactctgggcattgacttatcccgcgtcaagatcatcgatgatctgagtacaccgcaggggttcattaccaccgacatggatcaaaaccagattacgctgtttcacagcggcgcaatgatgcgttcgtttgaaaatcacgttcgtgatgtgccgggtgttaccttgggcctcgtaggtcctgatggccgcgagggcatgatccaaaatgccgaagaatttgctgctatgggcattccgttcatttttgacccaggtcaggcagtgcctctgttcagcggcccggaactgcgcgaatttatcgaacaggcggactatgtggtggtcaacgattacgaaagccgccttcttcaagcccgtactggctggaacgagcaggacattgttagccgcgtgcaggcgtatatcaccacgcaaggttcggctggagccgtggtaatgacaccggagaagcgctacgttattccggctgctaaaacttctcgtgtcgttgatccaactggttgcggcgacgcgtttcgcgccggcctgatctatggtattcagcatgaatatgattggttgaccattggccgcatgggaaacttaatgggtgcgctgaaagtggaacaccctggcggccaaaatcagcgtttcacctttgccgaattcaacgaccggttcaaacaatattttggctacgcgctc

SEQ ID NO: 2004 - protein, 321 aa, synthetic construct
  REGION 1..321: note = variant of adenosine kinase from Xanthemonas campestris
MHHHHHHGGSGMSALICGSLAYDNIMWFPDYFKNHILPDRVHRLNVSFLVFDMRREFGGCAGNIAYNLHLLGGRPIVMATVGQDFGPYREHFETLGIDLSRVKIIDDLSTPQGFITTDMDQNQITLFHSGAMMRSFENHVRDVPGVTLGLVGPDGREGMIQNAEEFAAMGIPFIFDPGQAVPLFSGPELREFIEQADYVVVNDYESRLLQARTGWNEQDIVSRVQAYITTQGSAGAVVMTPEKRYVIPAAKTSRVVDPTGCGDAFRAGLIYGIQHEYDWLTIGRMGNLMGALKVEHPGGQNQRFTFAEFNDRFKQYFGYAL

SEQ ID NO: 2005 - DNA, 963 bp, synthetic construct
  misc_feature 1..963: note = variant of adenosine kinase from Xanthemonas campestris
  source 1..963: mol_type = other DNA
atgcatcatcaccatcaccatggggggtccggtatgagtgcactcatttgcggttctttagcgtatgataacatcatgtggtttccggactatttcaagaaccatattctgcccgatcgtgttcaccgcctcaatgtcagctttctggtatttgacatgcgtcgtgaatttggaggctgtgccggcaacattgcgtacaatctgcatctgttgggtggtcgcccgatcgtaatggctacggtgggccaagatttcggtccgtatcgcgaacacttcgaaactctgggcattgacttatcccgcgtcaagatcatcgatgatctgagtacaccgcaggggttcattaccaccgacatggatcaaaaccagattacgctgtttcacagcggcgcaatgatgcgttcgtacgaaaatcacgttcgtgatgtgccgggtgttaccttgggcctcgtaggtcctgatggccgcgagggcatgatccaaaatgccgaagaatttgctgctatgggcattccgttcatttttgacccaggtcaggcagtgcctctgttcagcggcccggaactgcgcgaatttatcgaacaggcggactatgtggtggtcaacgattacgaaagccgccttcttcaagcccgtactggctggaacgagcaggacattgttagccgcgtgcaggcgtatatcaccacgcaaggttcggctggagccgtggtaatgacaccggagaagcgctttgttattccggctgctaaaacttctcgtgtcgttgatccaactggttgcggcgacgcgtttcgcgccggcctgatctatggtattcagcatgaatatgattggttgaccattggccgcatgggaaacttaatgggtgcgctgaaagtggaacaccctggcggccaaaatcagcgtttcacctttgccgaattcaacgaccggttcaaacaatattttggctacgcgctc

SEQ ID NO: 2006 - protein, 321 aa, synthetic construct
  REGION 1..321: note = variant of adenosine kinase from Xanthemonas campestris
MHHHHHHGGSGMSALICGSLAYDNIMWFPDYFKNHILPDRVHRLNVSFLVFDMRREFGGCAGNIAYNLHLLGGRPIVMATVGQDFGPYREHFETLGIDLSRVKIIDDLSTPQGFITTDMDQNQITLFHSGAMMRSYENHVRDVPGVTLGLVGPDGREGMIQNAEEFAAMGIPFIFDPGQAVPLFSGPELREFIEQADYVVVNDYESRLLQARTGWNEQDIVSRVQAYITTQGSAGAVVMTPEKRFVIPAAKTSRVVDPTGCGDAFRAGLIYGIQHEYDWLTIGRMGNLMGALKVEHPGGQNQRFTFAEFNDRFKQYFGYAL

SEQ ID NO: 2007 - DNA, 963 bp, synthetic construct
  misc_feature 1..963: note = variant of adenosine kinase from Xanthemonas campestris
  source 1..963: mol_type = other DNA
atgcatcatcaccatcaccatggggggtccggtatgagtgcactcatttgcggttctttagcgtatgataacatcatgtggtttccggactatttcaagaaccatattctgcccgatcgtgttcaccgcctcaatgtcagctttctggtatttgacatgcgtcgtgaatttggaggctgtgccggcaacattgcgtacaatctgcatctgttgggtggtcgcccgatcgtaatggctacggtgggccaagatttcggtccgtatcgcgaacacttcgaaactctgggcattgacttatcccgcgtcaagatcatcgatgatctgagtacaccgcaggggttcattaccaccgacatggatcaaaaccagattacgctgtttcacagcggcgcaatgatgcgttcgtacgaaaatcacgttcgtgatgtgccgggtgttaccttgggcctcgtaggtcctgatggccgcgagggcatgatccaaaatgccgaagaatttgctgctatgggcattccgttcatttttgacccaggtcaggcagtgcctctgttcagcggcccggaactgcgcgaatttatcgaacaggcggactatgtggtggtcaacgattacgaaagccgccttcttcaagcccgtactggctggaacgagcaggacattgttagccgcgtgcaggcgtatatcaccacgcaaggttcggctggagccgtggtaatgacaccggagaagcgctacactattccggctgctaaaacttctcgtgtcgttgatccaactggttgcggcgacgcgtttcgcgccggcctgatctatggtattcagcatgaatatgattggttgaccattggccgcatgggaaacttaatgggtgcgctgaaagtggaacaccctggcggccaaaatcagcgtttcacctttgccgaattcaacgaccggttcaaacaatattttggctacgcgctc

SEQ ID NO: 2008 - protein, 321 aa, synthetic construct
  REGION 1..321: note = variant of adenosine kinase from Xanthemonas campestris
MHHHHHHGGSGMSALICGSLAYDNIMWFPDYFKNHILPDRVHRLNVSFLVFDMRREFGGCAGNIAYNLHLLGGRPIVMATVGQDFGPYREHFETLGIDLSRVKIIDDLSTPQGFITTDMDQNQITLFHSGAMMRSYENHVRDVPGVTLGLVGPDGREGMIQNAEEFAAMGIPFIFDPGQAVPLFSGPELREFIEQADYVVVNDYESRLLQARTGWNEQDIVSRVQAYITTQGSAGAVVMTPEKRYTIPAAKTSRVVDPTGCGDAFRAGLIYGIQHEYDWLTIGRMGNLMGALKVEHPGGQNQRFTFAEFNDRFKQYFGYAL

SEQ ID NO: 2009 - DNA, 963 bp, synthetic construct
  misc_feature 1..963: note = variant of adenosine kinase from Xanthemonas campestris
  source 1..963: mol_type = other DNA
atgcatcatcaccatcaccatggggggtccggtatgagtgcactcatttgcggttctttagcgtatgataacatcatgtggtttccggactatttcaagaaccatattctgcccgatcgtgttcaccgcctcaatgtcagctttctggtatttgacatgcgtcgtgaatttggaggctgtgccggcaacattgcgtacaatctgcatctgttgggtggtcgcccgatcgtaatggctacggtgggccaagatttcggtccgtatcgcgaacacttcgaaactctgggcattgacttatcccgcgtcaagatcatcgatgatctgagtacaccgcaggggttcattaccaccgacatggatcaaaaccagattacgctgtttcacagcggcgcaatgatgcgttcgtacgaaaatcacgttcgtgatgtgccgggtgttaccttgggcctcgtaggtcctgatggccgcgagggcatgatccaaaatgccgaagaatttgctgctatgggcattccgttcatttttgacccaggtcaggcagtgcctctgttcagcggcccggaactgcgcgaatttatcgaacaggcggactatgtggtggtcaacgattacgaaagccgccttcttcaagcccgtactggctggaacgagcaggacattgttagccgcgtgcaggcgtatatcaccacgcaaggttcggctggagccgtggtatggacaccggagaagcgctacgttattccggctgctaaaacttctcgtgtcgttgatccaactggttgcggcgacgcgtttcgcgccggcctgatctatggtattcagcatgaatatgattggttgaccattggccgcatgggaaacttaatgggtgcgctgaaagtggaacaccctggcggccaaaatcagcgtttcacctttgccgaattcaacgaccggttcaaacaatattttggctacgcgctc

SEQ ID NO: 2010 - protein, 321 aa, synthetic construct
  REGION 1..321: note = variant of adenosine kinase from Xanthemonas campestris
MHHHHHHGGSGMSALICGSLAYDNIMWFPDYFKNHILPDRVHRLNVSFLVFDMRREFGGCAGNIAYNLHLLGGRPIVMATVGQDFGPYREHFETLGIDLSRVKIIDDLSTPQGFITTDMDQNQITLFHSGAMMRSYENHVRDVPGVTLGLVGPDGREGMIQNAEEFAAMGIPFIFDPGQAVPLFSGPELREFIEQADYVVVNDYESRLLQARTGWNEQDIVSRVQAYITTQGSAGAVVWTPEKRYVIPAAKTSRVVDPTGCGDAFRAGLIYGIQHEYDWLTIGRMGNLMGALKVEHPGGQNQRFTFAEFNDRFKQYFGYAL

SEQ ID NO: 2011 - DNA, 963 bp, synthetic construct
  misc_feature 1..963: note = variant of adenosine kinase from Xanthemonas campestris
  source 1..963: mol_type = other DNA
atgcatcatcaccatcaccatggggggtccggtatgagtgcactcatttgcggttctttagcgtatgataacatcatgtggtttccggactatttcaagaaccatattctgcccgatcgtgttcaccgcctcaatgtcagctttctggtatttgacatgcgtcgtgaatttggaggctgtgccggcaacattgcgtacaatctgcatctgttgggtggtcgcccgatcgtaatggctacggtgggccaagatttcggtccgtatcgcgaacacttcgaaactctgggcattgacttatcccgcgtcaagatcatcgatgatctgagtacaccgcaggggttcattaccaccgacatggatcaaaaccagattacggcgtttcacagcggcgcaatgatgcgttcgtacgaaaatcacgttcgtgatgtgccgggtgttaccttgggcctcgtaggtcctgatggccgcgagggcatgatccaaaatgccgaagaatttgctgctatgggcattccgttcatttttgacccaggtcaggcagtgcctctgttcagcggcccggaactgcgcgaatttatcgaacaggcggactatgtggtggtcaacgattacgaaagccgccttcttcaagcccgtactggctggaacgagcaggacattgttagccgcgtgcaggcgtatatcaccacgcaaggttcggctggagccgtggtaatgacaccggagaagcgctacgttattccggctgctaaagcttctcgtgtcgttgatccaactggttgcggcgacgcgtttcgcgccggcctgatctatggtattcagcatgaatatgattggttgaccattggccgcatgggaaacttaatgggtgcgctgaaagtggaacaccctggcggccaaaatcagcgtttcacctttgccgaattcaacgaccggttcaaacaatattttggctacgcgctc

SEQ ID NO: 2012 - protein, 321 aa, synthetic construct
  REGION 1..321: note = variant of adenosine kinase from Xanthemonas campestris
MHHHHHHGGSGMSALICGSLAYDNIMWFPDYFKNHILPDRVHRLNVSFLVFDMRREFGGCAGNIAYNLHLLGGRPIVMATVGQDFGPYREHFETLGIDLSRVKIIDDLSTPQGFITTDMDQNQITAFHSGAMMRSYENHVRDVPGVTLGLVGPDGREGMIQNAEEFAAMGIPFIFDPGQAVPLFSGPELREFIEQADYVVVNDYESRLLQARTGWNEQDIVSRVQAYITTQGSAGAVVMTPEKRYVIPAAKASRVVDPTGCGDAFRAGLIYGIQHEYDWLTIGRMGNLMGALKVEHPGGQNQRFTFAEFNDRFKQYFGYAL

SEQ ID NO: 2013 - DNA, 963 bp, synthetic construct
  misc_feature 1..963: note = variant of adenosine kinase from Xanthemonas campestris
  source 1..963: mol_type = other DNA
atgcatcatcaccatcaccatggggggtccggtatgagtgcactcatttgcggttctttagcgtatgataacatcatgtggtttccggactatttcaagaaccatattctgcccgatcgtgttcaccgcctcaatgtcagctttctggtatttgacatgcgtcgtgaatttggaggctgtgccggcaacattgcgtacaatctgcatctgttgggtggtcgcccgatcgtaatggctacggtgggccaagatttcggtccgtatcgcgaacacttcgaaactctgggcattgacttatcccgcgtcaagatcatcgatgatctgagtacaccgcaggggttcattaccaccgacatggatcaaaaccagattacggcgtttcacagcggcgcaatgatgcgttcgtacgaaaatcacgttcgtgatgtgccgggtgttaccttgggcctcgtaggtcctgatacccgcgagggcatgatccaaaatgccgaagaatttgctgctatgggcattccgttcatttttgacccaggtcaggcagtgcctctgttcagcggcccggaactgcgcgaatttatcgaacaggcggactatgtggtggtcaacgattacgaaagccgccttcttcaagcccgtactggctggaacgagcaggacattgttagccgcgtgcaggcgtatatcaccacgcaaggttcggctggagccgtggtacatacaccggagaagcgctacgttattccggctgctaaagcttctcgtgtcgttgatccaactggttgcggcgacgcgtttcgcgccggcctgatctatggtattcagcatgaatatgattggttgaccattggccgcatgggaaacttaatgggtgcgctgaaagtggaacaccctggcggccaaaatcagcgtttcacctttgccgaattcaacgaccggttcaaacaaatttttggctacgcgctc

SEQ ID NO: 2014 - protein, 321 aa, synthetic construct
  REGION 1..321: note = variant of adenosine kinase from Xanthemonas campestris
MHHHHHHGGSGMSALICGSLAYDNIMWFPDYFKNHILPDRVHRLNVSFLVFDMRREFGGCAGNIAYNLHLLGGRPIVMATVGQDFGPYREHFETLGIDLSRVKIIDDLSTPQGFITTDMDQNQITAFHSGAMMRSYENHVRDVPGVTLGLVGPDTREGMIQNAEEFAAMGIPFIFDPGQAVPLFSGPELREFIEQADYVVVNDYESRLLQARTGWNEQDIVSRVQAYITTQGSAGAVVHTPEKRYVIPAAKASRVVDPTGCGDAFRAGLIYGIQHEYDWLTIGRMGNLMGALKVEHPGGQNQRFTFAEFNDRFKQIFGYAL

SEQ ID NO: 2015 - DNA, 963 bp, synthetic construct
  misc_feature 1..963: note = variant of adenosine kinase from Xanthemonas campestris
  source 1..963: mol_type = other DNA
atgcatcatcaccatcaccatggggggtccggtatgagtgcactcatttgcggttctttagcgtatgataacatcatggggtttccggactatttcaagaaccatattctgcccgatcgtgttcatcgcctcaatgtcagctttctggtatttgacatgcgtcgtgaatttggaggctgtgccggcaacattgcgtacaatctgcatctgttgggtggtcgcccgatcgtaatggctacggtgggccaagatttcggtccgtatcgcgaacacttcgaaactctgggcattgacttatcccgcgtcaagatcatcgatgatctgagtacaccgcaggggttcattaccaccgacatggatcaaaaccagattacggcgtttcacagcggcgcaatgatgcgttcgtacgaaaatcacgttcgtgatgtgccgggtgttaccttgggcctcgtaggtcctgatggccgcgagggcatgatccaaaatgccgaagaatttgctgctatgggcattccgttcatttttgacccaggtcaggcagtgcctctgttcagcggcccggaactgcgcgaatttatcgaacaggcggactatgtggtggtcaacgattacgaaagccgccttcttcaagcccgtactggctggaacgagcaggacattgttagccgcgtgcaggcgtatatcaccacgcaaggttcggctggagccgtggtaatgacaccggagaagcgctacgttattccggctgctaaagcttctcgtgtcgttgatccaactggttgcggcgacgcgtttcgcgccggcctgatctatggtattcagcatgaatatgattggttgaccattggccgcatgggaaacttaatgggtgcgctgaaagtggaacaccctggcggccaaaatcagcgtttcacctttgccgaattcaacgaccggttcaaacaatattttggctacgcgctc

SEQ ID NO: 2016 - protein, 321 aa, synthetic construct
  REGION 1..321: note = variant of adenosine kinase from Xanthemonas campestris
MHHHHHHGGSGMSALICGSLAYDNIMGFPDYFKNHILPDRVHRLNVSFLVFDMRREFGGCAGNIAYNLHLLGGRPIVMATVGQDFGPYREHFETLGIDLSRVKIIDDLSTPQGFITTDMDQNQITAFHSGAMMRSYENHVRDVPGVTLGLVGPDGREGMIQNAEEFAAMGIPFIFDPGQAVPLFSGPELREFIEQADYVVVNDYESRLLQARTGWNEQDIVSRVQAYITTQGSAGAVVMTPEKRYVIPAAKASRVVDPTGCGDAFRAGLIYGIQHEYDWLTIGRMGNLMGALKVEHPGGQNQRFTFAEFNDRFKQYFGYAL

SEQ ID NO: 2017 - DNA, 963 bp, synthetic construct
  misc_feature 1..963: note = variant of adenosine kinase from Xanthemonas campestris
  source 1..963: mol_type = other DNA
atgcatcatcaccatcaccatggggggtccggtatgagtgcactcatttgcggttctttagcgtatgataacatcatgtggtttccggaccatttcaagaaccatattctgcccgatcgtgttcatcgcctcaatgtcagctttctggtatttgacatgcgtcgtgaatttggaggctgtgccggcaacattgcgtacaatctgcatctgttgggtggtcgcccgatcgtaatggctacggtgggccaagatttcggtccgtatcgcgaacacttcgaaactctgggcattgacttatcccgcgtcaagatcatcgatgatctgagtacaccgcaggggttcattaccaccgacatggatcaaaaccagattacggcgtttcacagcggcgcaatgatgcgttcgtacgaaaatcacgttcgtgatgtgccgggtgttaccttgggcctcgtaggtcctgatacccgcgagggcatgatccaaaatgccgaagaatttgctgctatgggcattccgttcatttttgacccaggtcaggcagtgcctctgttcagcggcccggaactgcgcgaatttatcgaacaggcggactatgtggtggtcaacgattacgaaagccgccttcttcaagcccgtactggctggaacgagcaggacattgttagccgcgtgcaggcgtatatcaccacgcaaggttcggctggagccgtggtaatgacaccggagaagcgctacgttattccggctgctaaagcttctcgtgtcgttgatccaactggttgcggcgacgcgtttcgcgccggcctgatctatggtattcagcatgaatatgattggttgaccattggccgcatgggaaacttaatgggtgcgctgaaagtggaacaccctggcggccaaaatcagcgtttcacctttgccgaattcaacgaccggttcaaacaatattttggctacgcgctc

SEQ ID NO: 2018 - protein, 321 aa, synthetic construct
  REGION 1..321: note = variant of adenosine kinase from Xanthemonas campestris
MHHHHHHGGSGMSALICGSLAYDNIMWFPDHFKNHILPDRVHRLNVSFLVFDMRREFGGCAGNIAYNLHLLGGRPIVMATVGQDFGPYREHFETLGIDLSRVKIIDDLSTPQGFITTDMDQNQITAFHSGAMMRSYENHVRDVPGVTLGLVGPDTREGMIQNAEEFAAMGIPFIFDPGQAVPLFSGPELREFIEQADYVVVNDYESRLLQARTGWNEQDIVSRVQAYITTQGSAGAVVMTPEKRYVIPAAKASRVVDPTGCGDAFRAGLIYGIQHEYDWLTIGRMGNLMGALKVEHPGGQNQRFTFAEFNDRFKQYFGYAL

SEQ ID NO: 2019 - DNA, 963 bp, synthetic construct
  misc_feature 1..963: note = variant of adenosine kinase from Xanthemonas campestris
  source 1..963: mol_type = other DNA
atgcatcatcaccatcaccatggggggtccggtatgagtgcactcatttgcggttctttagcgtatgataacatcatgtggtttccgggttatttcgcgaacgatattctgcccgatcgtgttcaccgcctcaatgtcagctttctggtatttgacatgcgtcgtgaatttggaggctgtgccggcaacattgcgtacaatctgcatctgttgggtggtcgcccgatcgtaatggctacggtgggccaagatttcggtccgtatcgcgaacacttcgaaactctgggcattgacttatcccgcgtcaagatcatcgatgatctgagtacaccgcaggggttcattaccaccgacatggatcaaaaccagattacgctgtttcacagcggcgcaatgatgcgttcgtacgaaaatcacgttcgtgatgtgccgggtgttaccttgggcctcgtaggtcctgatggccgcgagggcatgatccaaaatgccgaagaatttgctgctatgggcattccgttcatttttgacccaggtcaggcagtgcctctgttcagcggcccggaactgcgcgaatttatcgaacaggcggactatgtggtggtcaacgattacgaaagccgccttcttcaagcccgtactggctggaacgagcaggacattgttagccgcgtgcaggcgtatatcaccacgcaaggttcggctggagccgtggtaatgacaccggagaagcgctacgttattccggctgctaaagcttctcgtgtcgttgatccaactggttgcggcgacgcgtttcgcgccggcctgatctatggtattcagcatgaatatgattggttgaccattggccgcatgggaaacttaatgggtgcgctgaaagtggaacaccctggcggccaaaatcagcgtttcacctttgccgaattcaacgaccggttcaaacaatattttggctacgcgctc

SEQ ID NO: 2020 - protein, 321 aa, synthetic construct
  REGION 1..321: note = variant of adenosine kinase from Xanthemonas campestris
MHHHHHHGGSGMSALICGSLAYDNIMWFPGYFANDILPDRVHRLNVSFLVFDMRREFGGCAGNIAYNLHLLGGRPIVMATVGQDFGPYREHFETLGIDLSRVKIIDDLSTPQGFITTDMDQNQITLFHSGAMMRSYENHVRDVPGVTLGLVGPDGREGMIQNAEEFAAMGIPFIFDPGQAVPLFSGPELREFIEQADYVVVNDYESRLLQARTGWNEQDIVSRVQAYITTQGSAGAVVMTPEKRYVIPAAKASRVVDPTGCGDAFRAGLIYGIQHEYDWLTIGRMGNLMGALKVEHPGGQNQRFTFAEFNDRFKQYFGYAL

SEQ ID NO: 2021 - DNA, 963 bp, synthetic construct
  misc_feature 1..963: note = variant of adenosine kinase from Xanthemonas campestris
  source 1..963: mol_type = other DNA
atgcatcatcaccatcaccatggggggtccggtatgagtgcactcatttgcggttctttagcgtatgataacatcatggggtttggcgactatttcaagaaccatattctgcccgatcgtgttcaccgcctcaatgtcagctttctggtatttgacatgcgtcgtgaatttggaggctgtgccggcaacattgcgtacaatctgcatctgttgggtggtcgcccgatcgtaatggctacggtgggccaagatttcggtccgtatcgcgaacacttcgaaactctgggcattgacttatcccgcgtcaagatcatcgatgatctgagtacaccgcaggggttcattaccaccgacatggatcaaaaccagattacgctgtttcacagcggcgcaatgatgcgttcgtacgaaaatcacgttcgtgatgtgccgggtgttaccttgggcctcgtaggtcctgatggccgcgagggcatgatccaaaatgccgaagaatttgctgctatgggcattccgttcatttttgacccaggtcaggcagtgcctctgttcagcggcccggaactgcgcgaatttatcgaacaggcggactatgtggtggtcaacgattacgaaagccgccttcttcaagcccgtactggctggaacgagcaggacattgttagccgcgtgcaggcgtatatcaccacgcaaggttcggctggagccgtggtaatgacaccggagaagcgctacgttattccggctgctaaagcttctcgtgtcgttgatccaactggttgcggcgacgcgtttcgcgccggcctgatctatggtattcagcatgaatatgattggttgaccattggccgcatgggaaacttaatgggtgcgctgaaagtggaacaccctggcggccaaaatcagcgtttcacctttgccgaattcaacgaccggttcaaacaatattttggctacgcgctc

SEQ ID NO: 2022 - protein, 321 aa, synthetic construct
  REGION 1..321: note = variant of adenosine kinase from Xanthemonas campestris
MHHHHHHGGSGMSALICGSLAYDNIMGFGDYFKNHILPDRVHRLNVSFLVFDMRREFGGCAGNIAYNLHLLGGRPIVMATVGQDFGPYREHFETLGIDLSRVKIIDDLSTPQGFITTDMDQNQITLFHSGAMMRSYENHVRDVPGVTLGLVGPDGREGMIQNAEEFAAMGIPFIFDPGQAVPLFSGPELREFIEQADYVVVNDYESRLLQARTGWNEQDIVSRVQAYITTQGSAGAVVMTPEKRYVIPAAKASRVVDPTGCGDAFRAGLIYGIQHEYDWLTIGRMGNLMGALKVEHPGGQNQRFTFAEFNDRFKQYFGYAL

SEQ ID NO: 2023 - DNA, 963 bp, synthetic construct
  misc_feature 1..963: note = variant of adenosine kinase from Xanthemonas campestris
  source 1..963: mol_type = other DNA
atgcatcatcaccatcaccatggggggtccggtatgagtgcactcatttgcggttctttagcgtatgataacatcatgtggtttccgggtcatttcgcgaaccatattctgcccgatcgtgttcaccgcctcaatgtcagctttctggtatttgacatgcgtcgtgaatttggaggctgtgccggcaacattgcgtacaatctgcatctgttgggtggtcgcccgatcgtaatggctacggtgggccaagatttcggtccgtatcgcgaacacttcgaaactctgggcattgacttatcccgcgtcaagatcatcgatgatctgagtacaccgcaggggttcattaccaccgacatggatcaaaaccagattacggcgtttcacagcggcgcaatgatgcgttcgtacgaaaatcacgttcgtgatgtgccgggtgttaccttgggcctcgtaggtcctgatggccgcgagggcatgatccaaaatgccgaagaatttgctgctatgggcattccgttcatttttgacccaggtcaggcagtgcctctgttcagcggcccggaactgcgcgaatttatcgaacaggcggactatgtggtggtcaacgattacgaaagccgccttcttcaagcccgtactggctggaacgagcaggacattgttagccgcgtgcaggcgtatatcaccacgcaaggttcggctggagccgtggtaatgacaccggagaagcgctacgttattccggctgctaaagcttctcgtgtcgttgatccaactggttgcggcgacgcgtttcgcgccggcctgatctatggtattcagcatggatatgattggttgaccattggccgcatgggaaacttaatgggtgcgctgaaagtggaacaccctggcggccaaaatcagcgtttcacctttgccgaattcaacgaccggttcaaacaaatttttggctacgcgctc

SEQ ID NO: 2024 - protein, 321 aa, synthetic construct
  REGION 1..321: note = variant of adenosine kinase from Xanthemonas campestris
MHHHHHHGGSGMSALICGSLAYDNIMWFPGHFANHILPDRVHRLNVSFLVFDMRREFGGCAGNIAYNLHLLGGRPIVMATVGQDFGPYREHFETLGIDLSRVKIIDDLSTPQGFITTDMDQNQITAFHSGAMMRSYENHVRDVPGVTLGLVGPDGREGMIQNAEEFAAMGIPFIFDPGQAVPLFSGPELREFIEQADYVVVNDYESRLLQARTGWNEQDIVSRVQAYITTQGSAGAVVMTPEKRYVIPAAKASRVVDPTGCGDAFRAGLIYGIQHGYDWLTIGRMGNLMGALKVEHPGGQNQRFTFAEFNDRFKQIFGYAL

SEQ ID NO: 2025 - DNA, 963 bp, synthetic construct
  misc_feature 1..963: note = variant of adenosine kinase from Xanthemonas campestris
  source 1..963: mol_type = other DNA
atgcatcatcaccatcaccatggggggtccggtatgagtgcactcatttgcggttctttagcgtatgataacatcatgtggtttccggactatttcaagaaccatattctgcccgatcgtgttcaccgcctcaatgtcagctttctggtatttgacatgcgtcgtgaatttggaggctgtgccggcaacattgcgtacaatctgcatctgttgggtggtcgcccgatcgtaatggctacggtgggccaagatttcggtccgtatcgcgaacacttcgaaactctgggcattgacttatcccgcgtcaagatcatcgatgatctgagtacaccgcaggggttcattaccaccgacatggatcaaaaccagattacggcgtttcacagcggcgcaatgatgcgttcgtacgaaaatcacgttcgtgatgtgccgggtgttaccttgggcctcgtaggtcctgatacccgcgagggcatgatccaaaatgccgaagaatttgctgctatgggcattccgttcatttttgacccaggtcaggcagtgcctctgttcagcggcccggaactgcgcgaatttatcgaacaggcggactatgtggtggtcaacgattacgaaagccgccttcttcaagcccgtactggctggaacgagcaggacattgttagccgcgtgcaggcgtatatcaccacgcaaggttcggctggagccgtggtaatgacaccggagaagcgctatgttattccggctgctaaagcttctcgtgtcgttgatccaactggttgcggcgacgcgtttcgcgccggcctgatctatggtattcagcatgaatatgattggttgaccattggccgcatgggaaacttaatgggtgcgctgaaagtggaacaccctggcggccaaaatcagcgtttcacctttgccgaattcaacgaccggttcaaacaatattttggctacgcgctc

SEQ ID NO: 2026 - protein, 321 aa, synthetic construct
  REGION 1..321: note = variant of adenosine kinase from Xanthemonas campestris
MHHHHHHGGSGMSALICGSLAYDNIMWFPDYFKNHILPDRVHRLNVSFLVFDMRREFGGCAGNIAYNLHLLGGRPIVMATVGQDFGPYREHFETLGIDLSRVKIIDDLSTPQGFITTDMDQNQITAFHSGAMMRSYENHVRDVPGVTLGLVGPDTREGMIQNAEEFAAMGIPFIFDPGQAVPLFSGPELREFIEQADYVVVNDYESRLLQARTGWNEQDIVSRVQAYITTQGSAGAVVMTPEKRYVIPAAKASRVVDPTGCGDAFRAGLIYGIQHEYDWLTIGRMGNLMGALKVEHPGGQNQRFTFAEFNDRFKQYFGYAL

SEQ ID NO: 2027 - DNA, 963 bp, synthetic construct
  misc_feature 1..963: note = variant of adenosine kinase from Xanthemonas campestris
  source 1..963: mol_type = other DNA
atgcatcatcaccatcaccatggggggtccggtatgagtgcactcatttgcggttctttagcgtatgataacatcatgtggtttccggactatttcaagaaccatattctgcccgatcgtgttcaccgcctcaatgtcagctttctggtatttgacatgcgtcgtgaatttggaggctgtgccggcaacattgcgtacaatctgcatctgttgggtggtcgcccgatcgtaatggctacggtgggccaagatttcggtccgtatcgcgaacacttcgaaactctgggcattgacttatcccgcgtcaagatcatcgatgatctgagtacaccgcaggggttcattaccaccgacatggatcaaaaccagattacgctgtttcacagcggcgcaatgatgcgttcgtacgaaaatcacgttcgtgatgtgccgggtgttaccttgggcctcgtaggtcctgatggccgcgagggcatgatccaaaatgccgaagaatttgctgctatgggcattccgttcatttttgacccaggtcaggcagtgcctctgttcagcggcccggaactgcgcgaatttatcgaacaggcggactatgtggtggtcaacgattacgaaagccgccttcttcaagcccgtactggctggaacgagcaggacattgttagccgcgtgcaggcgtatatcaccacgcaaggttcggctggagccgtggtaatgacaccggagaagcgctttgttattccggctgctaaagcttctcgtgtcgttgatccaactggttgcggcgacgcgtttcgcgccggcctgatctatggtattcagcatgaatatgattggttgaccattggccgcatgggaaacttaatgggtgcgctgaaagtggaacaccctggcggccaaaatcagcgtttcacctttgccgaattcaacgaccggttcaaacaatattttggctacgcgctc

SEQ ID NO: 2028 - protein, 321 aa, synthetic construct
  REGION 1..321: note = variant of adenosine kinase from Xanthemonas campestris
MHHHHHHGGSGMSALICGSLAYDNIMWFPDYFKNHILPDRVHRLNVSFLVFDMRREFGGCAGNIAYNLHLLGGRPIVMATVGQDFGPYREHFETLGIDLSRVKIIDDLSTPQGFITTDMDQNQITLFHSGAMMRSYENHVRDVPGVTLGLVGPDGREGMIQNAEEFAAMGIPFIFDPGQAVPLFSGPELREFIEQADYVVVNDYESRLLQARTGWNEQDIVSRVQAYITTQGSAGAVVMTPEKRFVIPAAKASRVVDPTGCGDAFRAGLIYGIQHEYDWLTIGRMGNLMGALKVEHPGGQNQRFTFAEFNDRFKQYFGYAL

SEQ ID NO: 2029 - DNA, 963 bp, synthetic construct
  misc_feature 1..963: note = variant of adenosine kinase from Xanthemonas campestris
  source 1..963: mol_type = other DNA
atgcatcatcaccatcaccatggggggtccggtatgagtgcactcatttgcggttctttagcgtatgataacatcatggggtttccggaccatttcaagaaccatattctgcccgatcgtgttcatcgcctcaatgtcagctttctggtatttgacatgcgtcgtgaatttggaggctgtgccggcaacattgcgtacaatctgcatctgttgggtggtcgcccgatcgtaatggctacggtgggccaagatttcggtccgtatcgcgaacacttcgaaactctgggcattgacttatcccgcgtcaagatcatcgatgatctgagtacaccgcaggggttcattaccaccgacatggatcaaaaccagattacgctgtttcacagcggcgcaatgatgcgttcgtacgaaaatcacgttcgtgatgtgccgggtgttaccttgggcctcgtaggtcctgatacccgcgagggcatgatccaaaatgccgaagaatttgctgctatgggcattccgttcatttttgacccaggtcaggcagtgcctctgttcagcggcccggaactgcgcgaatttatcgaacaggcggactatgtggtggtcaacgattacgaaagccgccttcttcaagcccgtactggctggaacgagcaggacattgttagccgcgtgcaggcgtatatcaccacgcaaggttcggctggagccgtggtaatgacaccggagaagcgctacgttattccggctgctaaagcttctcgtgtcgttgatccaactggttgcggcgacgcgtttcgcgccggcctgatctatggtattcagcatgaatatgattggttgaccattggccgcatgggaaacttaatgggtgcgctgaaagtggaacaccctggcggccaaaatcagcgtttcacctttgccgaattcaacgaccggttcaaacaatattttggctacgcgctc

SEQ ID NO: 2030 - protein, 321 aa, synthetic construct
  REGION 1..321: note = variant of adenosine kinase from Xanthemonas campestris
MHHHHHHGGSGMSALICGSLAYDNIMGFPDHFKNHILPDRVHRLNVSFLVFDMRREFGGCAGNIAYNLHLLGGRPIVMATVGQDFGPYREHFETLGIDLSRVKIIDDLSTPQGFITTDMDQNQITLFHSGAMMRSYENHVRDVPGVTLGLVGPDTREGMIQNAEEFAAMGIPFIFDPGQAVPLFSGPELREFIEQADYVVVNDYESRLLQARTGWNEQDIVSRVQAYITTQGSAGAVVMTPEKRYVIPAAKASRVVDPTGCGDAFRAGLIYGIQHEYDWLTIGRMGNLMGALKVEHPGGQNQRFTFAEFNDRFKQYFGYAL

SEQ ID NO: 2031 - DNA, 963 bp, synthetic construct
  misc_feature 1..963: note = variant of adenosine kinase from Xanthemonas campestris
  source 1..963: mol_type = other DNA
atgcatcatcaccatcaccatggggggtccggtatgagtgcactcatttgcggttctttagcgtatgataacatcatgtggtttccggactatttcaagaaccatattctgcccgatcgtgttcaccgcctcaatgtcagctttctggtatttgacatgcgtcgtgaatttggaggctgtgccggcaacattgcgtacaatctgcatctgttgggtggtcgcccgatcgtaatggctacggtgggccaagatttcggtccgtatcgcgaacacttcgaaactctgggcattgacttatcccgcgtcaagatcatcgatgatctgagtacaccgcaggggttcattaccaccgacatggatcaaaaccagattacggcgtttcacagcggcgcaatgatgcgttcgtacgaaaatcacgttcgtgatgtgccgggtgttaccttgggcctcgtaggtcctgatggccgcgagggcatgatccaaaatgccgaagaatttgctgctatgggcattccgttcatttttgacccaggtcaggcagtgcctctgttcagcggcccggaactgcgcgaatttatcgaacaggcggactatgtggtggtcaacgattacgaaagccgccttcttcaagcccgtactggctggaacgagcaggacattgttagccgcgtgcaggcgtatatcaccacgcaaggttcggctggagccgtggtacatacaccggagaagcgctacgttattccggctgctaaagcctctcgtgtcgttgatccaactggttgcggcgacgcgtttcgcgccggcctgatctatggtattcagcatgaatatgattggttgaccattggccgcatgggaaacttaatgggtgcgctgaaagtggaacaccctggcggccaaaatcagcgtttcacctttgccgaattcaacgaccggttcaaacaaatttttggctacgcgctc

SEQ ID NO: 2032 - protein, 321 aa, synthetic construct
  REGION 1..321: note = variant of adenosine kinase from Xanthemonas campestris
MHHHHHHGGSGMSALICGSLAYDNIMWFPDYFKNHILPDRVHRLNVSFLVFDMRREFGGCAGNIAYNLHLLGGRPIVMATVGQDFGPYREHFETLGIDLSRVKIIDDLSTPQGFITTDMDQNQITAFHSGAMMRSYENHVRDVPGVTLGLVGPDGREGMIQNAEEFAAMGIPFIFDPGQAVPLFSGPELREFIEQADYVVVNDYESRLLQARTGWNEQDIVSRVQAYITTQGSAGAVVHTPEKRYVIPAAKASRVVDPTGCGDAFRAGLIYGIQHEYDWLTIGRMGNLMGALKVEHPGGQNQRFTFAEFNDRFKQIFGYAL

SEQ ID NO: 2033 - DNA, 963 bp, synthetic construct
  misc_feature 1..963: note = variant of adenosine kinase from Xanthemonas campestris
  source 1..963: mol_type = other DNA
atgcatcatcaccatcaccatggggggtccggtatgagtgcactcatttgcggttctttagcgtatgataacatcatgtggtttggcgaccatttcaagaaccatattctgcccgatcgtgttcatcgcctcaatgtcagctttctggtatttgacatgcgtcgtgaatttggaggctgtgccggcaacattgcgtacaatctgcatctgttgggtggtcgcccgatcgtaatggctacggtgggccaagatttcggtccgtatcgcgaacacttcgaaactctgggcattgacttatcccgcgtcaagatcatcgatgatctgagtacaccgcaggggttcattaccaccgacatggatcaaaaccagattacgctgtttcacagcggcgcaatgatgcgttcgtacgaaaatcacgttcgtgatgtgccgggtgttaccttgggcctcgtaggtcctgatggccgcgagggcatgatccaaaatgccgaagaatttgctgctatgggcattccgttcatttttgacccaggtcaggcagtgcctctgttcagcggcccggaactgcgcgaatttatcgaacaggcggactatgtggtggtcaacgattacgaaagccgccttcttcaagcccgtactggctggaacgagcaggacattgttagccgcgtgcaggcgtatatcaccacgcaaggttcggctggagccgtggtaatgacaccggagaagcgctatgttattccggctgctaaagcttctcgtgtcgttgatccaactggttgcggcgacgcgtttcgcgccggcctgatctatggtattcagcatgaatatgattggttgaccattggccgcatgggaaacttaatgggtgcgctgaaagtggaacaccctggcggccaaaatcagcgtttcacctttgccgaattcaacgaccggttcaaacaatattttggctacgcgctc

SEQ ID NO: 2034 - protein, 321 aa, synthetic construct
  REGION 1..321: note = variant of adenosine kinase from Xanthemonas campestris
MHHHHHHGGSGMSALICGSLAYDNIMWFGDHFKNHILPDRVHRLNVSFLVFDMRREFGGCAGNIAYNLHLLGGRPIVMATVGQDFGPYREHFETLGIDLSRVKIIDDLSTPQGFITTDMDQNQITLFHSGAMMRSYENHVRDVPGVTLGLVGPDGREGMIQNAEEFAAMGIPFIFDPGQAVPLFSGPELREFIEQADYVVVNDYESRLLQARTGWNEQDIVSRVQAYITTQGSAGAVVMTPEKRYVIPAAKASRVVDPTGCGDAFRAGLIYGIQHEYDWLTIGRMGNLMGALKVEHPGGQNQRFTFAEFNDRFKQYFGYAL

SEQ ID NO: 2035 - DNA, 963 bp, synthetic construct
  misc_feature 1..963: note = variant of adenosine kinase from Xanthemonas campestris
  source 1..963: mol_type = other DNA
atgcatcatcaccatcaccatggggggtccggtatgagtgcactcatttgcggttctttagcgtatgataacatcatgtggtttccggattatttcgcgaaccatattctgcccgatcgtgttcaccgcctcaatgtcagctttctggtatttgacatgcgtcgtgaatttggaggctgtgccggcaacattgcgtacaatctgcatctgttgggtggtcgcccgatcgtaatggctacggtgggccaagatttcggtccgtatcgcgaacacttcgaaactctgggcattgacttatcccgcgtcaagatcatcgatgatctgagtacaccgcaggggttcattaccaccgacatggatcaaaaccagattacggcgtttcacagcggcgcaatgatgcgttcgtacgaaaatcacgttcgtgatgtgccgggtgttaccttgggcctcgtaggtcctgatggccgcgagggcatgatccaaaatgccgaagaatttgctgctatgggcattccgttcatttttgacccaggtcaggcagtgcctctgttcagcggcccggaactgcgcgaatttatcgaacaggcggactatgtggtggtcaacgattacgaaagccgccttcttcaagcccgtactggctggaacgagcaggacattgttagccgcgtgcaggcgtatatcaccacgcaaggttcggctggagccgtggtacatacaccggagaagcgctacgttattccggctgctaaagcttctcgtgtcgttgatccaactggttgcggcgacgcgtttcgcgccggcctgatctatggtattcagcatgaatatgattggttgaccattggccgcatgggaaacttaatgggtgcgctgaaagtggaacaccctggcggccaaaatcagcgtttcacctttgccgaattcaacgaccggttcaaacaatattttggctacgcgctc

SEQ ID NO: 2036 - protein, 321 aa, synthetic construct
  REGION 1..321: note = variant of adenosine kinase from Xanthemonas campestris
MHHHHHHGGSGMSALICGSLAYDNIMWFPDYFANHILPDRVHRLNVSFLVFDMRREFGGCAGNIAYNLHLLGGRPIVMATVGQDFGPYREHFETLGIDLSRVKIIDDLSTPQGFITTDMDQNQITAFHSGAMMRSYENHVRDVPGVTLGLVGPDGREGMIQNAEEFAAMGIPFIFDPGQAVPLFSGPELREFIEQADYVVVNDYESRLLQARTGWNEQDIVSRVQAYITTQGSAGAVVHTPEKRYVIPAAKASRVVDPTGCGDAFRAGLIYGIQHEYDWLTIGRMGNLMGALKVEHPGGQNQRFTFAEFNDRFKQYFGYAL

SEQ ID NO: 2037 - DNA, 963 bp, synthetic construct
  misc_feature 1..963: note = variant of adenosine kinase from Xanthemonas campestris
  source 1..963: mol_type = other DNA
atgcatcatcaccatcaccatggggggtccggtatgagtgcactcatttgcggttctttagcgtatgataacatctttcggctgccggaccatttcaagaaccatattctgcccgatcgtgttcaccgcctcaatgtcagctttctggtatttgacatgcgtcgtgaatttggaggctgtgccggcaacattgcgtacaatctgcatctgttgggtggtcgcccgatcgtaatggctacggtgggccaagatttcggtccgtatcgcgaacacttcgaaactctgggcattgacttatcccgcgtcaagatcatcgatgatctgagtacaccgcaggggttcattaccaccgacatggatcaaaaccagattacgctgtttcacagcggcgcaatgatgcgttcgtacgaaaatcacgttcgtgatgtgccgggtgttaccttgggcctcgtaggtcctgatggccgcgagggcatgatccaaaatgccgaagaatttgctgctatgggcattccgttcatttttgacccaggtcaggcagtgcctctgttcagcggcccggaactgcgcgaatttatcgaacaggcggactatgtggtggtcaacgattacgaaagccgccttcttcaagcccgtactggctggaacgagcaggacattgttagccgcgtgcaggcgtatatcaccacgcaaggttcggctggagccgtggtaatgacaccggagaagcgctatgttattccggctgctaaagcttctcgtgtcgttgatccaactggttgcggcgacgcgtttcgcgccggcctgatctatggtattcagcatgaatatgattggttgaccattggccgcatgggaaacttaatgggtgcgctgaaagtggaacaccctggcggccaaaatcagcgtttcacctttgccgaattcaacgaccggttcaaacaatattttggctacgcgctc

SEQ ID NO: 2038 - protein, 321 aa, synthetic construct
  REGION 1..321: note = variant of adenosine kinase from Xanthemonas campestris
MHHHHHHGGSGMSALICGSLAYDNIFRLPDHFKNHILPDRVHRLNVSFLVFDMRREFGGCAGNIAYNLHLLGGRPIVMATVGQDFGPYREHFETLGIDLSRVKIIDDLSTPQGFITTDMDQNQITLFHSGAMMRSYENHVRDVPGVTLGLVGPDGREGMIQNAEEFAAMGIPFIFDPGQAVPLFSGPELREFIEQADYVVVNDYESRLLQARTGWNEQDIVSRVQAYITTQGSAGAVVMTPEKRYVIPAAKASRVVDPTGCGDAFRAGLIYGIQHEYDWLTIGRMGNLMGALKVEHPGGQNQRFTFAEFNDRFKQYFGYAL

SEQ ID NO: 2039 - DNA, 963 bp, synthetic construct
  misc_feature 1..963: note = variant of adenosine kinase from Xanthemonas campestris
  source 1..963: mol_type = other DNA
atgcatcatcaccatcaccatggggggtccggtatgagtgcactcatttgcggttctttagcgtatgataacatcatgtggtttccggactatttcaagaaccatattctgcccgatcgtgttcaccgcctcaatgtcagctttctggtatttgacatgcgtcgtgaatttggaggctgtgccggcaacattgcgtacaatctgcatctgttgggtggtcgcccgatcgtaatggctacggtgggccaagatttcggtccgtatcgcgaacacttcgaaactctgggcattgacttatcccgcgtcaagatcatcgatgatctgagtacaccgcaggggttcattaccaccgacatggatcaaaaccagattacgctgtttcacagcggcgcaatgatgcgttcgtacgaaaatcacgttcgtgatgtgccgggtgttaccttgggcctcgtaggtcctgatggccgcgagggcatgatccaaaatgccgaagaatttgctgctatgggcattccgttcatttttgacccaggtcaggcagtgcctctgttcagcggcccggaactgcgcgaatttatcgaacaggcggactatgtggtggtcaacgattacgaaagccgccttcttcaagcccgtactggctggaacgagcaggacattgttagccgcgtgcaggcgtatatcaccacgcaaggttcggctggagccgtggtaatgacaccggagaagcgctacgttattccggctgctaaagcttctcgtgtcgttgatccaactggttgcggcgacgcgtttcgcgccggcctgatctatggtattcagcatgaatatgattggttgaccattggccgcatgggaaacttaatgggtgcgctgaaagtggaacaccctggcggccaaaatcagcgtttcacctttgccgaattcaacgaccggttcaaacaaatttttggctacgcgctc

SEQ ID NO: 2040 - protein, 321 aa, synthetic construct
  REGION 1..321: note = variant of adenosine kinase from Xanthemonas campestris
MHHHHHHGGSGMSALICGSLAYDNIMWFPDYFKNHILPDRVHRLNVSFLVFDMRREFGGCAGNIAYNLHLLGGRPIVMATVGQDFGPYREHFETLGIDLSRVKIIDDLSTPQGFITTDMDQNQITLFHSGAMMRSYENHVRDVPGVTLGLVGPDGREGMIQNAEEFAAMGIPFIFDPGQAVPLFSGPELREFIEQADYVVVNDYESRLLQARTGWNEQDIVSRVQAYITTQGSAGAVVMTPEKRYVIPAAKASRVVDPTGCGDAFRAGLIYGIQHEYDWLTIGRMGNLMGALKVEHPGGQNQRFTFAEFNDRFKQIFGYAL

SEQ ID NO: 2041 - DNA, 963 bp, synthetic construct
  misc_feature 1..963: note = variant of adenosine kinase from Xanthemonas campestris
  source 1..963: mol_type = other DNA
atgcatcatcaccatcaccatggggggtccggtatgagtgcactcatttgcggttctttagcgtatgataacatcatggggtttccggactatttcaagaaccatattctgcccgatcgtgttcaccgcctcaatgtcagctttctggtatttgacatgcgtcgtgaatttggaggctgtgccggcaacattgcgtacaatctgcatctgttgggtggtcgcccgatcgtaatggctacggtgggccaagatttcggtccgtatcgcgaacacttcgaaactctgggcattgacttatcccgcgtcaagatcatcgatgatctgagtacaccgcaggggttcattaccaccgacatggatcaaaaccagattacggcgtttcacagcggcgcaatgatgcgttcgtacgaaaatcacgttcgtgatgtgccgggtgttaccttgggcctcgtaggtcctgatacccgcgagggcatgatccaaaatgccgaagaatttgctgctatgggcattccgttcatttttgacccaggtcaggcagtgcctctgttcagcggcccggaactgcgcgaatttatcgaacaggcggactatgtggtggtcaacgattacgaaagccgccttcttcaagcccgtactggctggaacgagcaggacattgttagccgcgtgcaggcgtatatcaccacgcaaggttcggctggagccgtggtaatgacaccggagaagcgctatgttattccggctgctaaagcttctcgtgtcgttgatccaactggttgcggcgacgcgtttcgcgccggcctgatctatggtattcagcatgaatatgattggttgaccattggccgcatgggaaacttaatgggtgcgctgaaagtggaacaccctggcggccaaaatcagcgtttcacctttgccgaattcaacgaccggttcaaacaatattttggctacgcgctc

SEQ ID NO: 2042 - protein, 321 aa, synthetic construct
  REGION 1..321: note = variant of adenosine kinase from Xanthemonas campestris
MHHHHHHGGSGMSALICGSLAYDNIMGFPDYFKNHILPDRVHRLNVSFLVFDMRREFGGCAGNIAYNLHLLGGRPIVMATVGQDFGPYREHFETLGIDLSRVKIIDDLSTPQGFITTDMDQNQITAFHSGAMMRSYENHVRDVPGVTLGLVGPDTREGMIQNAEEFAAMGIPFIFDPGQAVPLFSGPELREFIEQADYVVVNDYESRLLQARTGWNEQDIVSRVQAYITTQGSAGAVVMTPEKRYVIPAAKASRVVDPTGCGDAFRAGLIYGIQHEYDWLTIGRMGNLMGALKVEHPGGQNQRFTFAEFNDRFKQYFGYAL

SEQ ID NO: 2043 - DNA, 963 bp, synthetic construct
  misc_feature 1..963: note = variant of adenosine kinase from Xanthemonas campestris
  source 1..963: mol_type = other DNA
atgcatcatcaccatcaccatggggggtccggtatgagtgcactcatttgcggttctttagcgtatgataacatcatggggtttggcgactatttcaagaaccatattctgcccgatcgtgttcaccgcctcaatgtcagctttctggtatttgacatgcgtcgtgaatttggaggctgtgccggcaacattgcgtacaatctgcatctgttgggtggtcgcccgatcgtaatggctacggtgggccaagatttcggtccgtatcgcgaacacttcgaaactctgggcattgacttatcccgcgtcaagatcatcgatgatctgagtacaccgcaggggttcattaccaccgacatggatcaaaaccagattacgctgtttcacagcggcgcaatgatgcgttcgtacgaaaatcacgttcgtgatgtgccgggtgttaccttgggcctcgtaggtcctgatggccgcgagggcatgatccaaaatgccgaagaatttgctgctatgggcattccgttcatttttgacccaggtcaggcagtgcctctgttcagcggcccggaactgcgcgaatttatcgaacaggcggactatgtggtggtcaacgattacgaaagccgccttcttcaagcccgtactggctggaacgagcaggacattgttagccgcgtgcaggcgtatatcaccacgcaaggttcggctggagccgtggtaatgacaccggagaagcgctttgttattccggctgctaaagcttctcgtgtcgttgatccaactggttgcggcgacgcgtttcgcgccggcctgatctatggtattcagcatgaatatgattggttgaccattggccgcatgggaaacttaatgggtgcgctgaaagtggaacaccctggcggccaaaatcagcgtttcacctttgccgaattcaacgaccggttcaaacaatattttggctacgcgctc

SEQ ID NO: 2044 - protein, 321 aa, synthetic construct
  REGION 1..321: note = variant of adenosine kinase from Xanthemonas campestris
MHHHHHHGGSGMSALICGSLAYDNIMGFGDYFKNHILPDRVHRLNVSFLVFDMRREFGGCAGNIAYNLHLLGGRPIVMATVGQDFGPYREHFETLGIDLSRVKIIDDLSTPQGFITTDMDQNQITLFHSGAMMRSYENHVRDVPGVTLGLVGPDGREGMIQNAEEFAAMGIPFIFDPGQAVPLFSGPELREFIEQADYVVVNDYESRLLQARTGWNEQDIVSRVQAYITTQGSAGAVVMTPEKRFVIPAAKASRVVDPTGCGDAFRAGLIYGIQHEYDWLTIGRMGNLMGALKVEHPGGQNQRFTFAEFNDRFKQYFGYAL

SEQ ID NO: 2045 - DNA, 963 bp, synthetic construct
  misc_feature 1..963: note = variant of adenosine kinase from Xanthemonas campestris
  source 1..963: mol_type = other DNA
atgcatcatcaccatcaccatggggggtccggtatgagtgcactcatttgcggttctttagcgtatgataacatcatgtggtttccggactatttcaagaaccatattctgcccgatcgtgttcaccgcctcaatgtcagctttctggtatttgacatgcgtcgtgaatttggaggctgtgccggcaacattgcgtacaatctgcatctgttgggtggtcgcccgatcgtaatggctacggtgggccaagatttcggtccgtatcgcgaacacttcgaaactctgggcattgacttatcccgcgtcaagatcatcgatgatctgagtacaccgcaggggttcattaccaccgacatggatcaaaaccagattacggcgtttcacagcggcgcaatgatgcgttcgtacgaaaatcacgttcgtgatgtgccgggtgttaccttgggcctcgtaggtcctgatggccgcgagggcatgatccaaaatgccgaagaatttgctgctatgggcattccgttcatttttgacccaggtcaggcagtgcctctgttcagcggcccggaactgcgcgaatttatcgaacaggcggactatgtggtggtcaacgattacgaaagccgccttcttcaagcccgtactggctggaacgagcaggacattgttagccgcgtgcaggcgtatatcaccacgcaaggttcggctggagccgtggtaatgacaccggagaagcgctacgttattccggctgctaaagcttctcgtgtcgttgatccaactggttgcggcgacgcgtttcgcgccggcctgatctatggtattcagcatgaatatgattggttgaccattggccgcatgggaaacttaatgggtgcgctgaaagtggaacaccctggcggccaaaatcagcgtttcacctttgccgaattcaacgaccggttcaaacaaatttttggctacgcgctc

SEQ ID NO: 2046 - protein, 321 aa, synthetic construct
  REGION 1..321: note = variant of adenosine kinase from Xanthemonas campestris
MHHHHHHGGSGMSALICGSLAYDNIMWFPDYFKNHILPDRVHRLNVSFLVFDMRREFGGCAGNIAYNLHLLGGRPIVMATVGQDFGPYREHFETLGIDLSRVKIIDDLSTPQGFITTDMDQNQITAFHSGAMMRSYENHVRDVPGVTLGLVGPDGREGMIQNAEEFAAMGIPFIFDPGQAVPLFSGPELREFIEQADYVVVNDYESRLLQARTGWNEQDIVSRVQAYITTQGSAGAVVMTPEKRYVIPAAKASRVVDPTGCGDAFRAGLIYGIQHEYDWLTIGRMGNLMGALKVEHPGGQNQRFTFAEFNDRFKQIFGYAL

SEQ ID NO: 2047 - DNA, 963 bp, synthetic construct
  misc_feature 1..963: note = variant of adenosine kinase from Xanthemonas campestris
  source 1..963: mol_type = other DNA
atgcatcatcaccatcaccatggggggtccggtatgagtgcactcatttgcggttctttagcgtatgataacatcatgcggatgggcgactatttcaagaaccatattctgcccgatcgtgttcatcgcctcaatgtcagctttctggtatttgacatgcgtcgtgaatttggaggctgtgccggcaacattgcgtacaatctgcatctgttgggtggtcgcccgatcgtaatggctacggtgggccaagatttcggtccgtatcgcgaacacttcgaaactctgggcattgacttatcccgcgtcaagatcatcgatgatctgagtacaccgcaggggttcattaccaccgacatggatcaaaaccagattacggcgtttcacagcggcgcaatgatgcgttcgtacgaaaatcacgttcgtgatgtgccgggtgttaccttgggcctcgtaggtcctgatggccgcgagggcatgatccaaaatgccgaagaatttgctgctatgggcattccgttcatttttgacccaggtcaggcagtgcctctgttcagcggcccggaactgcgcgaatttatcgaacaggcggactatgtggtggtcaacgattacgaaagccgccttcttcaagcccgtactggctggaacgagcaggacattgttagccgcgtgcaggcgtatatcaccacgcaaggttcggctggagccgtggtaatgacaccggagaagcgctatgttattccggctgctaaagcttctcgtgtcgttgatccaactggttgcggcgacgcgtttcgcgccggcctgatctatggtattcagcatgaatatgattggttgaccattggccgcatgggaaacttaatgggtgcgctgaaagtggaacaccctggcggccaaaatcagcgtttcacctttgccgaattcaacgaccggttcaaacaatattttggctacgcgctc

SEQ ID NO: 2048 - protein, 321 aa, synthetic construct
  REGION 1..321: note = variant of adenosine kinase from Xanthemonas campestris
MHHHHHHGGSGMSALICGSLAYDNIMRMGDYFKNHILPDRVHRLNVSFLVFDMRREFGGCAGNIAYNLHLLGGRPIVMATVGQDFGPYREHFETLGIDLSRVKIIDDLSTPQGFITTDMDQNQITAFHSGAMMRSYENHVRDVPGVTLGLVGPDGREGMIQNAEEFAAMGIPFIFDPGQAVPLFSGPELREFIEQADYVVVNDYESRLLQARTGWNEQDIVSRVQAYITTQGSAGAVVMTPEKRYVIPAAKASRVVDPTGCGDAFRAGLIYGIQHEYDWLTIGRMGNLMGALKVEHPGGQNQRFTFAEFNDRFKQYFGYAL

SEQ ID NO: 2049 - DNA, 963 bp, synthetic construct
  misc_feature 1..963: note = variant of adenosine kinase from Xanthemonas campestris
  source 1..963: mol_type = other DNA
atgcatcatcaccatcaccatggggggtccggtatgagtgcactcatttgcggttctttagcgtatgataacatcatgcggtttggcgactatttcaagaaccatattctgcccgatcgtgttcaccgcctcaatgtcagctttctggtatttgacatgcgtcgtgaatttggaggctgtgccggcaacattgcgtacaatctgcatctgttgggtggtcgcccgatcgtaatggctacggtgggccaagatttcggtccgtatcgcgaacacttcgaaactctgggcattgacttatcccgcgtcaagatcatcgatgatctgagtacaccgcaggggttcattaccaccgacatggatcaaaaccagattacggcgtttcacagcggcgcaatgatgcgttcgtacgaaaatcacgttcgtgatgtgccgggtgttaccttgggcctcgtaggtcctgatggccgcgagggcatgatccaaaatgccgaagaatttgctgctatgggcattccgttcatttttgacccaggtcaggcagtgcctctgttcagcggcccggaactgcgcgaatttatcgaacaggcggactatgtggtggtcaacgattacgaaagccgccttcttcaagcccgtactggctggaacgagcaggacattgttagccgcgtgcaggcgtatatcaccacgcaaggttcggctggagccgtggtaatgacaccggagaagcgctacgttattccggctgctaaagcttctcgtgtcgttgatccaactggttgcggcgacgcgtttcgcgccggcctgatctatggtattcagcatgaatatgattggttgaccattggccgcatgggaaacttaatgggtgcgctgaaagtggaacaccctggcggccaaaatcagcgtttcacctttgccgaattcaacgaccggttcaaacaatattttggctacgcgctc

SEQ ID NO: 2050 - protein, 321 aa, synthetic construct
  REGION 1..321: note = variant of adenosine kinase from Xanthemonas campestris
MHHHHHHGGSGMSALICGSLAYDNIMRFGDYFKNHILPDRVHRLNVSFLVFDMRREFGGCAGNIAYNLHLLGGRPIVMATVGQDFGPYREHFETLGIDLSRVKIIDDLSTPQGFITTDMDQNQITAFHSGAMMRSYENHVRDVPGVTLGLVGPDGREGMIQNAEEFAAMGIPFIFDPGQAVPLFSGPELREFIEQADYVVVNDYESRLLQARTGWNEQDIVSRVQAYITTQGSAGAVVMTPEKRYVIPAAKASRVVDPTGCGDAFRAGLIYGIQHEYDWLTIGRMGNLMGALKVEHPGGQNQRFTFAEFNDRFKQYFGYAL

SEQ ID NO: 2051 - DNA, 963 bp, synthetic construct
  misc_feature 1..963: note = variant of adenosine kinase from Xanthemonas campestris
  source 1..963: mol_type = other DNA
atgcatcatcaccatcaccatggggggtccggtatgagtgcactcatttgcggttctttagcgtatgataacatcatgtggtttccggactatttcaagaaccatattctgcccgatcgtgttcaccgcctcaatgtcagctttctggtatttgacatgcgtcgtgaatttggaggctgtgccggcaacattgcgtacaatctgcatctgttgggtggtcgcccgatcgtaatggctacggtgggccaagatttcggtccgtatcgcgaacacttcgaaactctgggcattgacttatcccgcgtcaagatcatcgatgatctgagtacaccgcaggggttcattaccaccgacatggatcaaaaccagattacgctgtttcacagcggcgcaatgatgcgttcgtacgaaaatcacgttcgtgatgtgccgggtgttaccttgggcctcgtaggtcctgatacccgcgagggcatgatccaaaatgccgaagaatttgctgctatgggcattccgttcatttttgacccaggtcaggcagtgcctctgttcagcggcccggaactgcgcgaatttatcgaacaggcggactatgtggtggtcaacgattacgaaagccgccttcttcaagcccgtactggctggaacgagcaggacattgttagccgcgtgcaggcgtatatcaccacgcaaggttcggctggagccgtggtaatgacaccggagaagcgctacgttattccggctgctaaagcttctcgtgtcgttgatccaactggttgcggcgacgcgtttcgcgccggcctgatctatggtattcagcatgaatatgattggttgaccattggccgcatgggaaacttaatgggtgcgctgaaagtggaacaccctggcggccaaaatcagcgtttcacctttgccgaattcaacgaccggttcaaacaaatttttggctacgcgctc

SEQ ID NO: 2052 - protein, 321 aa, synthetic construct
  REGION 1..321: note = variant of adenosine kinase from Xanthemonas campestris
MHHHHHHGGSGMSALICGSLAYDNIMWFPDYFKNHILPDRVHRLNVSFLVFDMRREFGGCAGNIAYNLHLLGGRPIVMATVGQDFGPYREHFETLGIDLSRVKIIDDLSTPQGFITTDMDQNQITLFHSGAMMRSYENHVRDVPGVTLGLVGPDTREGMIQNAEEFAAMGIPFIFDPGQAVPLFSGPELREFIEQADYVVVNDYESRLLQARTGWNEQDIVSRVQAYITTQGSAGAVVMTPEKRYVIPAAKASRVVDPTGCGDAFRAGLIYGIQHEYDWLTIGRMGNLMGALKVEHPGGQNQRFTFAEFNDRFKQIFGYAL

SEQ ID NO: 2053 - DNA, 963 bp, synthetic construct
  misc_feature 1..963: note = variant of adenosine kinase from Xanthemonas campestris
  source 1..963: mol_type = other DNA
atgcatcatcaccatcaccatggggggtccggtatgagtgcactcatttgcggttctttagcgtatgataacatcatgtggtttccggactatttcaagaaccatattctgcccgatcgtgttcaccgcctcaatgtcagctttctggtatttgacatgcgtcgtgaatttggaggctgtgccggcaacattgcgtacaatctgcatctgttgggtggtcgcccgatcgtaatggctacggtgggccaagatttcggtccgtatcgcgaacacttcgaaactctgggcattgacttatcccgcgtcaagatcatcgatgatctgagtacaccgcaggggttcattaccaccgacatggatcaaaaccagattacgctgtttcacagcggcgcaatgatgcgttcgtacgaaaatcacgttcgtgatgtgccgggtgttaccttgggcctcgtaggtcctgatacccgcgagggcatgatccaaaatgccgaagaatttgctgctatgggcattccgttcatttttgacccaggtcaggcagtgcctctgttcagcggcccggaactgcgcgaatttatcgaacaggcggactatgtggtggtcaacgattacgaaagccgccttcttcaagcccgtactggctggaacgagcaggacattgttagccgcgtgcaggcgtatatcaccacgcaaggttcggctggagccgtggtaatgacaccggagaagcgctacgttattccggctgctaaagcttctcgtgtcgttgatccaactggttgcggcgacgcgtttcgcgccggcctgatctatggtattcagcatggatatgattggttgaccattggccgcatgggaaacttaatgggtgcgctgaaagtggaacaccctggcggccaaaatcagcgtttcacctttgccgaattcaacgaccggttcaaacaaatttttggctacgcgctc

SEQ ID NO: 2054 - protein, 321 aa, synthetic construct
  REGION 1..321: note = variant of adenosine kinase from Xanthemonas campestris
MHHHHHHGGSGMSALICGSLAYDNIMWFPDYFKNHILPDRVHRLNVSFLVFDMRREFGGCAGNIAYNLHLLGGRPIVMATVGQDFGPYREHFETLGIDLSRVKIIDDLSTPQGFITTDMDQNQITLFHSGAMMRSYENHVRDVPGVTLGLVGPDTREGMIQNAEEFAAMGIPFIFDPGQAVPLFSGPELREFIEQADYVVVNDYESRLLQARTGWNEQDIVSRVQAYITTQGSAGAVVMTPEKRYVIPAAKASRVVDPTGCGDAFRAGLIYGIQHGYDWLTIGRMGNLMGALKVEHPGGQNQRFTFAEFNDRFKQIFGYAL

SEQ ID NO: 2055 - DNA, 963 bp, synthetic construct
  misc_feature 1..963: note = variant of adenosine kinase from Xanthemonas campestris
  source 1..963: mol_type = other DNA
atgcatcatcaccatcaccatggggggtccggtatgagtgcactcatttgcggttctttagcgtatgataacatcatgtggtttccggactatttcaagaaccatattctgcccgatcgtgttcatcgcctcaatgtcagctttctggtatttgacatgcgtcgtgaatttggaggctgtgccggcaacattgcgtacaatctgcatctgttgggtggtcgcccgatcgtaatggctacggtgggccaagatttcggtccgtatcgcgaacacttcgaaactctgggcattgacttatcccgcgtcaagatcatcgatgatctgagtacaccgcaggggttcattaccaccgacatggatcaaaaccagattacggcgtttcacagcggcgcaatgatgcgttcgtacgaaaatcacgttcgtgatgtgccgggtgttaccttgggcctcgtaggtcctgatacccgcgagggcatgatccaaaatgccgaagaatttgctgctatgggcattccgttcatttttgacccaggtcaggcagtgcctctgttcagcggcccggaactgcgcgaatttatcgaacaggcggactatgtggtggtcaacgattacgaaagccgccttcttcaagcccgtactggctggaacgagcaggacattgttagccgcgtgcaggcgtatatcaccacgcaaggttcggctggagccaaagtaatgacaccggagaagcgctatgttattccggctgctaaagcttctcgtgtcgttgatccaactggttgcggcgacgcgtttcgcgccggcctgatctatggtattcagcatgaatatgattggttgaccattggccgcatgggaaacttaatgggtgcgctgaaagtggaacaccctggcggccaaaatcagcgtttcacctttgccgaattcaacgaccggttcaaacaatattttggctacgcgctc

SEQ ID NO: 2056 - protein, 321 aa, synthetic construct
  REGION 1..321: note = variant of adenosine kinase from Xanthemonas campestris
MHHHHHHGGSGMSALICGSLAYDNIMWFPDYFKNHILPDRVHRLNVSFLVFDMRREFGGCAGNIAYNLHLLGGRPIVMATVGQDFGPYREHFETLGIDLSRVKIIDDLSTPQGFITTDMDQNQITAFHSGAMMRSYENHVRDVPGVTLGLVGPDTREGMIQNAEEFAAMGIPFIFDPGQAVPLFSGPELREFIEQADYVVVNDYESRLLQARTGWNEQDIVSRVQAYITTQGSAGAKVMTPEKRYVIPAAKASRVVDPTGCGDAFRAGLIYGIQHEYDWLTIGRMGNLMGALKVEHPGGQNQRFTFAEFNDRFKQYFGYAL

SEQ ID NO: 2057 - DNA, 963 bp, synthetic construct
  misc_feature 1..963: note = variant of adenosine kinase from Xanthemonas campestris
  source 1..963: mol_type = other DNA
atgcatcatcaccatcaccatggggggtccggtatgagtgcactcatttgcggttctttagcgtatgataacatcatgtggtttggcgaccatttcaagaaccatattctgcccgatcgtgttcatcgcctcaatgtcagctttctggtatttgacatgcgtcgtgaatttggaggctgtgccggcaacattgcgtacaatctgcatctgttgggtggtcgcccgatcgtaatggctacggtgggccaagatttcggtccgtatcgcgaacacttcgaaactctgggcattgacttatcccgcgtcaagatcatcgatgatctgagtacaccgcaggggttcattaccaccgacatggatcaaaaccagattacggcgtttcacagcggcgcaatgatgcgttcgtacgaaaatcacgttcgtgatgtgccgggtgttaccttgggcctcgtaggtcctgatggccgcgagggcatgatccaaaatgccgaagaatttgctgctatgggcattccgttcatttttgacccaggtcaggcagtgcctctgttcagcggcccggaactgcgcgaatttatcgaacaggcggactatgtggtggtcaacgattacgaaagccgccttcttcaagcccgtactggctggaacgagcaggacattgttagccgcgtgcaggcgtatatcaccacgcaaggttcggctggagccgtggtaacgacaccggagaagcgctatgttattccggctgctaaagcttctcgtgtcgttgatccaactggttgcggcgacgcgtttcgcgccggcctgatctatggtattcagcatgaatatgattggttgaccattggccgcatgggaaacttaatgggtgcgctgaaagtggaacaccctggcggccaaaatcagcgtttcacctttgccgaattcaacgaccggttcaaacaatattttggctacgcgctc

SEQ ID NO: 2058 - protein, 321 aa, synthetic construct
  REGION 1..321: note = variant of adenosine kinase from Xanthemonas campestris
MHHHHHHGGSGMSALICGSLAYDNIMWFGDHFKNHILPDRVHRLNVSFLVFDMRREFGGCAGNIAYNLHLLGGRPIVMATVGQDFGPYREHFETLGIDLSRVKIIDDLSTPQGFITTDMDQNQITAFHSGAMMRSYENHVRDVPGVTLGLVGPDGREGMIQNAEEFAAMGIPFIFDPGQAVPLFSGPELREFIEQADYVVVNDYESRLLQARTGWNEQDIVSRVQAYITTQGSAGAVVTTPEKRYVIPAAKASRVVDPTGCGDAFRAGLIYGIQHEYDWLTIGRMGNLMGALKVEHPGGQNQRFTFAEFNDRFKQYFGYAL

SEQ ID NO: 2059 - DNA, 963 bp, synthetic construct
  misc_feature 1..963: note = variant of adenosine kinase from Xanthemonas campestris
  source 1..963: mol_type = other DNA
atgcatcatcaccatcaccatggggggtccggtatgagtgcactcatttgcggttctttagcgtatgataacatcatgtggtttccggactatttcaagaaccatattctgcccgatcgtgttaatcgcctcaatgtcagctttctggtatttgacatgcgtcgtgaatttggaggctgtgccggcaacattgcgtacaatctgcatctgttgggtggtcgcccgatcgtaatggctacggtgggccaagatttcggtccgtatcgcgaacacttcgaaactctgggcattgacttatcccgcgtcaagatcatcgatgatctgagtacaccgcaggggttcattaccaccgacatggatcaaaaccagattacgctgtttcacagcggcgcaatgatgcgttcgtacgaaaatcacgttcgtgatgtgccgggtgttaccttgggcctcgtaggtcctgatggccgcgagggcatgatccaaaatgccgaagaatttgctgctatgggcattccgttcatttttgacccaggtcaggcagtgcctctgttcagcggcccggaactgcgcgaatttatcgaacaggcggactatgtggtggtcaacgattacgaaagccgccttcttcaagcccgtactggctggaacgagcaggacattgttagccgcgtgcaggcgtatatcaccacgcaaggttcggctggagccgtggtaatgacaccggagaagcgctacgttattccggctgctaaagcttctcgtgtcgttgatccaactggttgcggcgacgcgtttcgcgccggcctgatctatggtattcagcatgaatatgattggttgaccattggccgcatgggaaacttaatgggtgcgctgaaagtggaacaccctggcggccaaaatcagcgtttcacctttgccgaattcaacgaccggttcaaacaatattttggctacgcgctc

SEQ ID NO: 2060 - protein, 321 aa, synthetic construct
  REGION 1..321: note = variant of adenosine kinase from Xanthemonas campestris
MHHHHHHGGSGMSALICGSLAYDNIMWFPDYFKNHILPDRVNRLNVSFLVFDMRREFGGCAGNIAYNLHLLGGRPIVMATVGQDFGPYREHFETLGIDLSRVKIIDDLSTPQGFITTDMDQNQITLFHSGAMMRSYENHVRDVPGVTLGLVGPDGREGMIQNAEEFAAMGIPFIFDPGQAVPLFSGPELREFIEQADYVVVNDYESRLLQARTGWNEQDIVSRVQAYITTQGSAGAVVMTPEKRYVIPAAKASRVVDPTGCGDAFRAGLIYGIQHEYDWLTIGRMGNLMGALKVEHPGGQNQRFTFAEFNDRFKQYFGYAL

SEQ ID NO: 2061 - DNA, 963 bp, synthetic construct
  misc_feature 1..963: note = variant of adenosine kinase from Xanthemonas campestris
  source 1..963: mol_type = other DNA
atgcatcatcaccatcaccatggggggtccggtatgagtgcactcatttgcggttctttagcgtatgataacatcatgtggtttccggactatttcaagaaccatattctgcccgatcgtgttcaccgcctcaatgtcagctttctggtatttgacatgcgtcgtgaatttggaggctgtgccggcaacattgcgtacaatctgcatctgttgggtggtcgcccgatcgtaatggctacggtgggccaagatttcggtccgtatcgcgaacacttcgaaactctgggcattgacttatcccgcgtcaagatcatcgatgatctgagtacaccgcaggggttcattaccaccgacatggatcaaaaccagattacgctgtttcacagcggcgcaatgatgcgttcgtacgaaaatcacgttcgtgatgtgccgggtgttaccttgggcctcgtaggtcctgatggccgcgagggcatgatccaaaatgccgaagaatttgctgctatgggcattccgttcatttttgacccaggtcaggcagtgcctctgttcagcggcccggaactgcgcgaatttatcgaacaggcggactatgtggtggtcaacgattacgaaagccgccttcttcaagcccgtactggctggaacgagaacgacattgttagccgcgtgcaggcgtatatcaccacgcaaggttcggctggagccgtggtaatgacaccggagaagcgctacgttattccggctgctaaagcttctcgtgtcgttgatccaactggttgcggcgacgcgtttcgcgccggcctgatctatggtattcagcatgaatatgattggttgaccattggccgcatgggaaacttaatgggtgcgctgaaagtggaacaccctggcggccaaaatcagcgtttcacctttgccgaattcaacgaccggttcaaacaatattttggctacgcgctc

SEQ ID NO: 2062 - protein, 321 aa, synthetic construct
  REGION 1..321: note = variant of adenosine kinase from Xanthemonas campestris
MHHHHHHGGSGMSALICGSLAYDNIMWFPDYFKNHILPDRVHRLNVSFLVFDMRREFGGCAGNIAYNLHLLGGRPIVMATVGQDFGPYREHFETLGIDLSRVKIIDDLSTPQGFITTDMDQNQITLFHSGAMMRSYENHVRDVPGVTLGLVGPDGREGMIQNAEEFAAMGIPFIFDPGQAVPLFSGPELREFIEQADYVVVNDYESRLLQARTGWNENDIVSRVQAYITTQGSAGAVVMTPEKRYVIPAAKASRVVDPTGCGDAFRAGLIYGIQHEYDWLTIGRMGNLMGALKVEHPGGQNQRFTFAEFNDRFKQYFGYAL

SEQ ID NO: 2063 - DNA, 963 bp, synthetic construct
  misc_feature 1..963: note = variant of adenosine kinase from Xanthemonas campestris
  source 1..963: mol_type = other DNA
atgcatcatcaccatcaccatggggggtccggtatgagtgcactcatttgcggttctttagcgtatgataacatcatgtggtttccggactatttcaagaaccatattctgcccgatcgtgttcaccgcctcaatgtcagctttctggtatttgacatgcgtcgtgaatttggaggctgtgccggcaacattgcgtacaatctgcatctgttgggtggtcgcccgatcgtaatggctacggtgggccaagatttcggtccgtatcgcgaacacttcgaaactctgggcattgacttatcccgcgtcaagatcatcgatgatctgagtacaccgcaggggttcattaccaccgacatggatcaaaaccagattacgctgtttcacagcggcgcaatgatgcgttcgtacgaaaatcacgttcgtgatgtgccgggtgttaccttgggcctcgtaggtcctgatggccgcgagggcatgatccaaaatgccgaagaatttgctgctatgggcattccgttcatttttgacccaggtcaggcagtgcctctgttcagcggcccggaactgcgcgaatttatcgaacaggcggactatgtggtggtcaacgattacgaaagccgccttcttcaagcccgtactggctggaacgagaacgacattgttagccgcgtgcaggcgtatatcaccacgcaaggttcggctggagccgtggtacatacaccggagaagcgctacgttattccggctgctaaagcttctcgtgtcgttgatccaactggttgcggcgacgcgtttcgcgccggcctgatctatggtattcagcatgaatatgattggttgaccattggccgcatgggaaacttaatgggtgcgctgaaagtggaacaccctggcggccaaaatcagcgtttcacctttgccgaattcaacgaccggttcaaacaaatttttggctacgcgctc

SEQ ID NO: 2064 - protein, 321 aa, synthetic construct
  REGION 1..321: note = variant of adenosine kinase from Xanthemonas campestris
MHHHHHHGGSGMSALICGSLAYDNIMWFPDYFKNHILPDRVHRLNVSFLVFDMRREFGGCAGNIAYNLHLLGGRPIVMATVGQDFGPYREHFETLGIDLSRVKIIDDLSTPQGFITTDMDQNQITLFHSGAMMRSYENHVRDVPGVTLGLVGPDGREGMIQNAEEFAAMGIPFIFDPGQAVPLFSGPELREFIEQADYVVVNDYESRLLQARTGWNENDIVSRVQAYITTQGSAGAVVHTPEKRYVIPAAKASRVVDPTGCGDAFRAGLIYGIQHEYDWLTIGRMGNLMGALKVEHPGGQNQRFTFAEFNDRFKQIFGYAL

SEQ ID NO: 2065 - DNA, 963 bp, synthetic construct
  misc_feature 1..963: note = variant of adenosine kinase from Xanthemonas campestris
  source 1..963: mol_type = other DNA
atgcatcatcaccatcaccatggggggtccggtatgagtgcactcatttgcggttctttagcgtatgataacatcatgtggtttccggactatttcaagaaccatattctgcccgatcgtgttcaccgcctcaatgtcagctttctggtatttgacatgcgtcgtgaatttggaggctgtgccggcaacattgcgtacaatctgcatctgttgggtggtcgcccgatcgtaatggctacggtgggccaagatttcggtccgtatcgcgaacacttcgaaactctgggcattgacttatcccgcgtcaagatcatcgatgatctgagtacaccgcaggggttcattaccaccgacatggatcaaaaccagattacggcgtttcacagcggcgcaatgatgcgttcgtacgaaaatcacgttcgtgatgtgccgggtgttaccttgggcctcgtaggtcctgatacccgcgagggcatgatccaaaatgccgaagaatttgctgctatgggcattccgttcatttttgacccaggtcaggcagtgcctctgttcagcggcccggaactgcgcgaatttatcgaacaggcggactatgtggtggtcaacgattacgaaagccgccttcttcaagcccgtactggctggaacgagcaggacattgttagccgcgtgcaggcgtatatcaccacgcaaggttcggctggagccgtggtaacgacaccggagaagcgctacgttattccggctgctaaagcttctcgtgtcgttgatccaactggttgcggcgacgcgtttcgcgccggcctgatctatggtattcagcatggatatgattggttgaccattggccgcatgggaaacttaatgggtgcgctgaaagtggaacaccctggcggccaaaatcagcgtttcacctttgccgaattcaacgaccggttcaaacaatattttggctacgcgctc

SEQ ID NO: 2066 - protein, 321 aa, synthetic construct
  REGION 1..321: note = variant of adenosine kinase from Xanthemonas campestris
MHHHHHHGGSGMSALICGSLAYDNIMWFPDYFKNHILPDRVHRLNVSFLVFDMRREFGGCAGNIAYNLHLLGGRPIVMATVGQDFGPYREHFETLGIDLSRVKIIDDLSTPQGFITTDMDQNQITAFHSGAMMRSYENHVRDVPGVTLGLVGPDTREGMIQNAEEFAAMGIPFIFDPGQAVPLFSGPELREFIEQADYVVVNDYESRLLQARTGWNEQDIVSRVQAYITTQGSAGAVVTTPEKRYVIPAAKASRVVDPTGCGDAFRAGLIYGIQHGYDWLTIGRMGNLMGALKVEHPGGQNQRFTFAEFNDRFKQYFGYAL

SEQ ID NO: 2067 - DNA, 963 bp, synthetic construct
  misc_feature 1..963: note = variant of adenosine kinase from Xanthemonas campestris
  source 1..963: mol_type = other DNA
atgcatcatcaccatcaccatggggggtccggtatgagtgcactcatttgcggttctttagcgtatgataacatcatgtggtttccggactatttcaagaaccatattctgcccgatcgtgttcaccgcctcaatgtcagctttctggtatttgacatgcgtcgtgaatttggaggctgtgccggcaacattgcgtacaatctgcatctgttgggtggtcgcccgatcgtaatggctacggtgggccaagatttcggtccgtatcgcgaacacttcgaaactctgggcattgacttatcccgcgtcaagatcatcgatgatctgagtacaccgcaggggttcattaccaccgacatggatcaaaaccagattacgctgtttcacagcggcgcaatgatgcgttcgtacgaaaatcacgttcgtgatgtgccgggtgttaccttgggcctcgtaggtcctgatggccgcgagggcatgatccaaaatgccgaagaatttgctgctatgggcattccgttcatttttgacccaggtcaggcagtgcctctgttcagcggcccggaactgcgcgaatttatcgaacaggcggactatgtggtggtcaacgattacgaaagccgccttcttcaagcccgtactggctggaacgagcaggacattgttagccgcgtgcaggcgtatatcaccacgcaaggttcggctggagccgtggtacatacaccggagaagcgctacgttattccggctgctaaagcttctcgtgtcgttgatccaactggttgcggcgacgcgtttcgcgccggcctgatctatggtattcagcatgaatatgattggttgaccattggccgcatgggaaacttaatgggtgcgctgaaagtggaacaccctggcggccaaaatcagcgtttcacctttgccgaattcaacgaccggttcaaacaatattttggctacgcgctc

SEQ ID NO: 2068 - protein, 321 aa, synthetic construct
  REGION 1..321: note = variant of adenosine kinase from Xanthemonas campestris
MHHHHHHGGSGMSALICGSLAYDNIMWFPDYFKNHILPDRVHRLNVSFLVFDMRREFGGCAGNIAYNLHLLGGRPIVMATVGQDFGPYREHFETLGIDLSRVKIIDDLSTPQGFITTDMDQNQITLFHSGAMMRSYENHVRDVPGVTLGLVGPDGREGMIQNAEEFAAMGIPFIFDPGQAVPLFSGPELREFIEQADYVVVNDYESRLLQARTGWNEQDIVSRVQAYITTQGSAGAVVHTPEKRYVIPAAKASRVVDPTGCGDAFRAGLIYGIQHEYDWLTIGRMGNLMGALKVEHPGGQNQRFTFAEFNDRFKQYFGYAL

SEQ ID NO: 2069 - DNA, 963 bp, synthetic construct
  misc_feature 1..963: note = variant of adenosine kinase from Xanthemonas campestris
  source 1..963: mol_type = other DNA
atgcatcatcaccatcaccatggggggtccggtatgagtgcactcatttgcggttctttagcgtatgataacatcatggggtttggcgactatttcaagaaccatattctgcccgatcgtgttcatcgcctcaatgtcagctttctggtatttgacatgcgtcgtgaatttggaggctgtgccggcaacattgcgtacaatctgcatctgttgggtggtcgcccgatcgtaatggctacggtgggccaagatttcggtccgtatcgcgaacacttcgaaactctgggcattgacttatcccgcgtcaagatcatcgatgatctgagtacaccgcaggggttcattaccaccgacatggatcaaaaccagattacgctgtttcacagcggcgcaatgatgcgttcgtacgaaaatcacgttcgtgatgtgccgggtgttaccttgggcctcgtaggtcctgatggccgcgagggcatgatccaaaatgccgaagaatttgctgctatgggcattccgttcatttttgacccaggtcaggcagtgcctctgttcagcggcccggaactgcgcgaatttatcgaacaggcggactatgtggtggtcaacgattacgaaagccgccttcttcaagcccgtactggctggaacgagcaggacattgttagccgcgtgcaggcgtatatcaccacgcaaggttcggctggagccaaagtaatgacaccggagaagcgctacgttattccggctgctaaagcttctcgtgtcgttgatccaactggttgcggcgacgcgtttcgcgccggcctgatctatggtattcagcatgaatatgattggttgaccattggccgcatgggaaacttaatgggtgcgctgaaagtggaacaccctggcggccaaaatcagcgtttcacctttgccgaattcaacgaccggttcaaacaatattttggctacgcgctc

SEQ ID NO: 2070 - protein, 321 aa, synthetic construct
  REGION 1..321: note = variant of adenosine kinase from Xanthemonas campestris
MHHHHHHGGSGMSALICGSLAYDNIMGFGDYFKNHILPDRVHRLNVSFLVFDMRREFGGCAGNIAYNLHLLGGRPIVMATVGQDFGPYREHFETLGIDLSRVKIIDDLSTPQGFITTDMDQNQITLFHSGAMMRSYENHVRDVPGVTLGLVGPDGREGMIQNAEEFAAMGIPFIFDPGQAVPLFSGPELREFIEQADYVVVNDYESRLLQARTGWNEQDIVSRVQAYITTQGSAGAKVMTPEKRYVIPAAKASRVVDPTGCGDAFRAGLIYGIQHEYDWLTIGRMGNLMGALKVEHPGGQNQRFTFAEFNDRFKQYFGYAL

SEQ ID NO: 2071 - DNA, 963 bp, synthetic construct
  misc_feature 1..963: note = variant of adenosine kinase from Xanthemonas campestris
  source 1..963: mol_type = other DNA
atgcatcatcaccatcaccatggggggtccggtatgagtgcactcatttgcggttctttagcgtatgataacatcatgtggctgccggactatttcaagaaccatattctgcccgatcgtgttcatcgcctcaatgtcagctttctggtatttgacatgcgtcgtgaatttggaggctgtgccggcaacattgcgtacaatctgcatctgttgggtggtcgcccgatcgtaatggctacggtgggccaagatttcggtccgtatcgcgaacacttcgaaactctgggcattgacttatcccgcgtcaagatcatcgatgatctgagtacaccgcaggggttcattaccaccgacatggatcaaaaccagattacgctgtttcacagcggcgcaatgatgcgttcgtacgaaaatcacgttcgtgatgtgccgggtgttaccttgggcctcgtaggtcctgatggccgcgagggcatgatccaaaatgccgaagaatttgctgctatgggcattccgttcatttttgacccaggtcaggcagtgcctctgttcagcggcccggaactgcgcgaatttatcgaacaggcggactatgtggtggtcaacgattacgaaagccgccttcttcaagcccgtactggctggaacgagcaggacattgttagccgcgtgcaggcgtatatcaccacgcaaggttcggctggagccgtggtaacgacaccggagaagcgctatgttattccggctgctaaagcttctcgtgtcgttgatccaactggttgcggcgacgcgtttcgcgccggcctgatctatggtattcagcatgaatatgattggttgaccattggccgcatgggaaacttaatgggtgcgctgaaagtggaacaccctggcggccaaaatcagcgtttcacctttgccgaattcaacgaccggttcaaacaatattttggctacgcgctc

SEQ ID NO: 2072 - protein, 321 aa, synthetic construct
  REGION 1..321: note = variant of adenosine kinase from Xanthemonas campestris
MHHHHHHGGSGMSALICGSLAYDNIMWLPDYFKNHILPDRVHRLNVSFLVFDMRREFGGCAGNIAYNLHLLGGRPIVMATVGQDFGPYREHFETLGIDLSRVKIIDDLSTPQGFITTDMDQNQITLFHSGAMMRSYENHVRDVPGVTLGLVGPDGREGMIQNAEEFAAMGIPFIFDPGQAVPLFSGPELREFIEQADYVVVNDYESRLLQARTGWNEQDIVSRVQAYITTQGSAGAVVTTPEKRYVIPAAKASRVVDPTGCGDAFRAGLIYGIQHEYDWLTIGRMGNLMGALKVEHPGGQNQRFTFAEFNDRFKQYFGYAL

SEQ ID NO: 2073 - DNA, 963 bp, synthetic construct
  misc_feature 1..963: note = variant of adenosine kinase from Xanthemonas campestris
  source 1..963: mol_type = other DNA
atgcatcatcaccatcaccatggggggtccggtatgagtgcactcatttgcggttctttagcgtatgataacatcatggggtttggcgactatttcaagaaccatattctgcccgatcgtgttcatcgcctcaatgtcagctttctggtatttgacatgcgtcgtgaatttggaggctgtgccggcaacattgcgtacaatctgcatctgttgggtggtcgcccgatcgtaatggctacggtgggccaagatttcggtccgtatcgcgaacacttcgaaactctgggcattgacttatcccgcgtcaagatcatcgatgatctgagtacaccgcaggggttcattaccaccgacatggatcaaaaccagattacgctgtttcacagcggcgcaatgatgcgttcgtacgaaaatcacgttcgtgatgtgccgggtgttaccttgggcctcgtaggtcctgatggccgcgagggcatgatccaaaatgccgaagaatttgctgctatgggcattccgttcatttttgacccaggtcaggcagtgcctctgttcagcggcccggaactgcgcgaatttatcgaacaggcggactatgtggtggtcaacgattacgaaagccgccttcttcaagcccgtactggctggaacgagcaggacattgttagccgcgtgcaggcgtatatcaccacgcaaggttcggctggagcccaagtaatgacaccggagaagcgctacgttattccggctgctaaagcttctcgtgtcgttgatccaactggttgcggcgacgcgtttcgcgccggcctgatctatggtattcagcatgaatatgattggttgaccattggccgcatgggaaacttaatgggtgcgctgaaagtggaacaccctggcggccaaaatcagcgtttcacctttgccgaattcaacgaccggttcaaacaatattttggctacgcgctc

SEQ ID NO: 2074 - protein, 321 aa, synthetic construct
  REGION 1..321: note = variant of adenosine kinase from Xanthemonas campestris
MHHHHHHGGSGMSALICGSLAYDNIMGFGDYFKNHILPDRVHRLNVSFLVFDMRREFGGCAGNIAYNLHLLGGRPIVMATVGQDFGPYREHFETLGIDLSRVKIIDDLSTPQGFITTDMDQNQITLFHSGAMMRSYENHVRDVPGVTLGLVGPDGREGMIQNAEEFAAMGIPFIFDPGQAVPLFSGPELREFIEQADYVVVNDYESRLLQARTGWNEQDIVSRVQAYITTQGSAGAQVMTPEKRYVIPAAKASRVVDPTGCGDAFRAGLIYGIQHEYDWLTIGRMGNLMGALKVEHPGGQNQRFTFAEFNDRFKQYFGYAL

SEQ ID NO: 2075 - DNA, 963 bp, synthetic construct
  misc_feature 1..963: note = variant of adenosine kinase from Xanthemonas campestris
  source 1..963: mol_type = other DNA
atgcatcatcaccatcaccatggggggtccggtatgagtgcactcatttgcggttctttagcgtatgataacatcatgtggtttccggactatttcaagaaccatattctgcccgatcgtgttcaccgcctcaatgtcagctttctggtatttgacatgcgtcgtgaatttggaggctgtgccggcaacattgcgtacaatctgcatctgttgggtggtcgcccgatcgtaatggctacggtgggccaagatttcggtccgtatcgcgaacacttcgaaactctgggcattgacttatcccgcgtcaagatcatcgatgatctgagtacaccgcaggggttcattaccaccgacatggatcaaaaccagattacggcgtttcacagcggcgcaatgatgcgttcgtacgaaaatcacgttcgtgatgtgccgggtgttaccttgggcctcgtaggtcctgatggccgcgagggcatgatccaaaatgccgaagaatttgctgctatgggcattccgttcatttttgacccaggtcaggcagtgcctctgttcagcggcccggaactgcgcgaatttatcgaacaggcggactatgtggtggtcaacgattacgaaagccgccttcttcaagcccgtactggctggaacgagcaggacattgttagccgcgtgcaggcgtatatcaccacgcaaggttcggctggagccgtggtacatacaccggagaagcgctacgttattccggctgctaaagcttctcgtgtcgttgatccaactggttgcggcgacgcgtttcgcgccggcctgatctatggtattcagcatgaatatgattggttgaccattggccgcatgggaaacttaatgggtgcgctgaaagtggaacaccctggcggccaaaatcagcgtttcacctttgccgaattcaacgaccggttcaaacaatattttggctacgcgctc

SEQ ID NO: 2076 - protein, 321 aa, synthetic construct
  REGION 1..321: note = variant of adenosine kinase from Xanthemonas campestris
MHHHHHHGGSGMSALICGSLAYDNIMWFPDYFKNHILPDRVHRLNVSFLVFDMRREFGGCAGNIAYNLHLLGGRPIVMATVGQDFGPYREHFETLGIDLSRVKIIDDLSTPQGFITTDMDQNQITAFHSGAMMRSYENHVRDVPGVTLGLVGPDGREGMIQNAEEFAAMGIPFIFDPGQAVPLFSGPELREFIEQADYVVVNDYESRLLQARTGWNEQDIVSRVQAYITTQGSAGAVVHTPEKRYVIPAAKASRVVDPTGCGDAFRAGLIYGIQHEYDWLTIGRMGNLMGALKVEHPGGQNQRFTFAEFNDRFKQYFGYAL

SEQ ID NO: 2077 - DNA, 963 bp, synthetic construct
  misc_feature 1..963: note = variant of adenosine kinase from Xanthemonas campestris
  source 1..963: mol_type = other DNA
atgcatcatcaccatcaccatggggggtccggtatgagtgcactcatttgcggttctttagcgtatgataacatcatgtggtttccggatcatttcgcgaaccatattctgcccgatcgtgttcaccgcctcaatgtcagctttctggtatttgacatgcgtcgtgaatttggaggctgtgccggcaacattgcgtacaatctgcatctgttgggtggtcgcccgatcgtaatggctacggtgggccaagatttcggtccgtatcgcgaacacttcgaaactctgggcattgacttatcccgcgtcaagatcatcgatgatctgagtacaccgcaggggttcattaccaccgacatggatcaaaaccagattacgctgtttcacagcggcgcaatgatgcgttcgtacgaaaatcacgttcgtgatgtgccgggtgttaccttgggcctcgtaggtcctgatggccgcgagggcatgatccaaaatgccgaagaatttgctgctatgggcattccgttcatttttgacccaggtcaggcagtgcctctgttcagcggcccggaactgcgcgaatttatcgaacaggcggactatgtggtggtcaacgattacgaaagccgccttcttcaagcccgtactggctggaacgagaacgacattgttagccgcgtgcaggcgtatatcaccacgcaaggttcggctggagccgtggtaatgacaccggagaagcgctacgttattccggctgctaaagcttctcgtgtcgttgatccaactggttgcggcgacgcgtttcgcgccggcctgatctatggtattcagcatggatatgattggttgaccattggccgcatgggaaacttaatgggtgcgctgaaagtggaacaccctggcggccaaaatcagcgtttcacctttgccgaattcaacgaccggttcaaacaatattttggctacgcgctc

SEQ ID NO: 2078 - protein, 321 aa, synthetic construct
  REGION 1..321: note = variant of adenosine kinase from Xanthemonas campestris
MHHHHHHGGSGMSALICGSLAYDNIMWFPDHFANHILPDRVHRLNVSFLVFDMRREFGGCAGNIAYNLHLLGGRPIVMATVGQDFGPYREHFETLGIDLSRVKIIDDLSTPQGFITTDMDQNQITLFHSGAMMRSYENHVRDVPGVTLGLVGPDGREGMIQNAEEFAAMGIPFIFDPGQAVPLFSGPELREFIEQADYVVVNDYESRLLQARTGWNENDIVSRVQAYITTQGSAGAVVMTPEKRYVIPAAKASRVVDPTGCGDAFRAGLIYGIQHGYDWLTIGRMGNLMGALKVEHPGGQNQRFTFAEFNDRFKQYFGYAL

SEQ ID NO: 2079 - DNA, 963 bp, synthetic construct
  misc_feature 1..963: note = variant of adenosine kinase from Xanthemonas campestris
  source 1..963: mol_type = other DNA
atgcatcatcaccatcaccatggggggtccggtatgagtgcactcatttgcggttctttagcgtatgataacatcatgcggtttccggactatttcaagaaccatattctgcccgatcgtgttcatcgcctcaatgtcagctttctggtatttgacatgcgtcgtgaatttggaggctgtgccggcaacattgcgtacaatctgcatctgttgggtggtcgcccgatcgtaatggctacggtgggccaagatttcggtccgtatcgcgaacacttcgaaactctgggcattgacttatcccgcgtcaagatcatcgatgatctgagtacaccgcaggggttcattaccaccgacatggatcaaaaccagattacgctgtttcacagcggcgcaatgatgcgttcgtacgaaaatcacgttcgtgatgtgccgggtgttaccttgggcctcgtaggtcctgatggccgcgagggcatgatccaaaatgccgaagaatttgctgctatgggcattccgttcatttttgacccaggtcaggcagtgcctctgttcagcggcccggaactgcgcgaatttatcgaacaggcggactatgtggtggtcaacgattacgaaagccgccttcttcaagcccgtactggctggaacgagcaggacattgttagccgcgtgcaggcgtatatcaccacgcaaggttcggctggagccgtggtaatgacaccggagaagcgctacgttattccggctgctaaagcttctcgtgtcgttgatccaactggttgcggcgacgcgtttcgcgccggcctgatctatggtattcagcatgaatatgattggttgaccattggccgcatgggaaacttaatgggtgcgctgaaagtggaacaccctggcggccaaaatcagcgtttcacctttgccgaattcaacgaccggttcaaacaatattttggctacgcgctc

SEQ ID NO: 2080 - protein, 321 aa, synthetic construct
  REGION 1..321: note = variant of adenosine kinase from Xanthemonas campestris
MHHHHHHGGSGMSALICGSLAYDNIMRFPDYFKNHILPDRVHRLNVSFLVFDMRREFGGCAGNIAYNLHLLGGRPIVMATVGQDFGPYREHFETLGIDLSRVKIIDDLSTPQGFITTDMDQNQITLFHSGAMMRSYENHVRDVPGVTLGLVGPDGREGMIQNAEEFAAMGIPFIFDPGQAVPLFSGPELREFIEQADYVVVNDYESRLLQARTGWNEQDIVSRVQAYITTQGSAGAVVMTPEKRYVIPAAKASRVVDPTGCGDAFRAGLIYGIQHEYDWLTIGRMGNLMGALKVEHPGGQNQRFTFAEFNDRFKQYFGYAL

SEQ ID NO: 2081 - DNA, 963 bp, synthetic construct
  misc_feature 1..963: note = variant of adenosine kinase from Xanthemonas campestris
  source 1..963: mol_type = other DNA
atgcatcatcaccatcaccatggggggtccggtatgagtgcactcatttgcggttctttagcgtatgataacatctttcggatgccggactatttcaagaaccatattctgcccgatcgtgttcaccgcctcaatgtcagctttctggtatttgacatgcgtcgtgaatttggaggctgtgccggcaacattgcgtacaatctgcatctgttgggtggtcgcccgatcgtaatggctacggtgggccaagatttcggtccgtatcgcgaacacttcgaaactctgggcattgacttatcccgcgtcaagatcatcgatgatctgagtacaccgcaggggttcattaccaccgacatggatcaaaaccagattacgctgtttcacagcggcgcaatgatgcgttcgtacgaaaatcacgttcgtgatgtgccgggtgttaccttgggcctcgtaggtcctgatggccgcgagggcatgatccaaaatgccgaagaatttgctgctatgggcattccgttcatttttgacccaggtcaggcagtgcctctgttcagcggcccggaactgcgcgaatttatcgaacaggcggactatgtggtggtcaacgattacgaaagccgccttcttcaagcccgtactggctggaacgagcaggacattgttagccgcgtgcaggcgtatatcaccacgcaaggttcggctggagccgtggtaatgacaccggagaagcgctttgttattccggctgctaaagcttctcgtgtcgttgatccaactggttgcggcgacgcgtttcgcgccggcctgatctatggtattcagcatgaatatgattggttgaccattggccgcatgggaaacttaatgggtgcgctgaaagtggaacaccctggcggccaaaatcagcgtttcacctttgccgaattcaacgaccggttcaaacaatattttggctacgcgctc

SEQ ID NO: 2082 - protein, 321 aa, synthetic construct
  REGION 1..321: note = variant of adenosine kinase from Xanthemonas campestris
MHHHHHHGGSGMSALICGSLAYDNIFRMPDYFKNHILPDRVHRLNVSFLVFDMRREFGGCAGNIAYNLHLLGGRPIVMATVGQDFGPYREHFETLGIDLSRVKIIDDLSTPQGFITTDMDQNQITLFHSGAMMRSYENHVRDVPGVTLGLVGPDGREGMIQNAEEFAAMGIPFIFDPGQAVPLFSGPELREFIEQADYVVVNDYESRLLQARTGWNEQDIVSRVQAYITTQGSAGAVVMTPEKRFVIPAAKASRVVDPTGCGDAFRAGLIYGIQHEYDWLTIGRMGNLMGALKVEHPGGQNQRFTFAEFNDRFKQYFGYAL

SEQ ID NO: 2083 - DNA, 963 bp, synthetic construct
  misc_feature 1..963: note = variant of adenosine kinase from Xanthemonas campestris
  source 1..963: mol_type = other DNA
atgcatcatcaccatcaccatggggggtccggtatgagtgcactcatttgcggttctttagcgtatgataacatcatggggatgccggactatttcaagaaccatattctgcccgatcgtgttcaccgcctcaatgtcagctttctggtatttgacatgcgtcgtgaatttggaggctgtgccggcaacattgcgtacaatctgcatctgttgggtggtcgcccgatcgtaatggctacggtgggccaagatttcggtccgtatcgcgaacacttcgaaactctgggcattgacttatcccgcgtcaagatcatcgatgatctgagtacaccgcaggggttcattaccaccgacatggatcaaaaccagattacgctgtttcacagcggcgcaatgatgcgttcgtacgaaaatcacgttcgtgatgtgccgggtgttaccttgggcctcgtaggtcctgatggccgcgagggcatgatccaaaatgccgaagaatttgctgctatgggcattccgttcatttttgacccaggtcaggcagtgcctctgttcagcggcccggaactgcgcgaatttatcgaacaggcggactatgtggtggtcaacgattacgaaagccgccttcttcaagcccgtactggctggaacgagcaggacattgttagccgcgtgcaggcgtatatcaccacgcaaggttcggctggagccgtggtaatgacaccggagaagcgctacgttattccggctgctaaagcttctcgtgtcgttgatccaactggttgcggcgacgcgtttcgcgccggcctgatctatggtattcagcatgaatatgattggttgaccattggccgcatgggaaacttaatgggtgcgctgaaagtggaacaccctggcggccaaaatcagcgtttcacctttgccgaattcaacgaccggttcaaacaatattttggctacgcgctc

SEQ ID NO: 2084 - protein, 321 aa, synthetic construct
  REGION 1..321: note = variant of adenosine kinase from Xanthemonas campestris
MHHHHHHGGSGMSALICGSLAYDNIMGMPDYFKNHILPDRVHRLNVSFLVFDMRREFGGCAGNIAYNLHLLGGRPIVMATVGQDFGPYREHFETLGIDLSRVKIIDDLSTPQGFITTDMDQNQITLFHSGAMMRSYENHVRDVPGVTLGLVGPDGREGMIQNAEEFAAMGIPFIFDPGQAVPLFSGPELREFIEQADYVVVNDYESRLLQARTGWNEQDIVSRVQAYITTQGSAGAVVMTPEKRYVIPAAKASRVVDPTGCGDAFRAGLIYGIQHEYDWLTIGRMGNLMGALKVEHPGGQNQRFTFAEFNDRFKQYFGYAL

SEQ ID NO: 2085 - DNA, 963 bp, synthetic construct
  misc_feature 1..963: note = variant of adenosine kinase from Xanthemonas campestris
  source 1..963: mol_type = other DNA
atgcatcatcaccatcaccatggggggtccggtatgagtgcactcatttgcggttctttagcgtatgataacatcatgtggatgccggaccatttcaagaaccatattctgcccgatcgtgttcatcgcctcaatgtcagctttctggtatttgacatgcgtcgtgaatttggaggctgtgccggcaacattgcgtacaatctgcatctgttgggtggtcgcccgatcgtaatggctacggtgggccaagatttcggtccgtatcgcgaacacttcgaaactctgggcattgacttatcccgcgtcaagatcatcgatgatctgagtacaccgcaggggttcattaccaccgacatggatcaaaaccagattacgctgtttcacagcggcgcaatgatgcgttcgtacgaaaatcacgttcgtgatgtgccgggtgttaccttgggcctcgtaggtcctgatggccgcgagggcatgatccaaaatgccgaagaatttgctgctatgggcattccgttcatttttgacccaggtcaggcagtgcctctgttcagcggcccggaactgcgcgaatttatcgaacaggcggactatgtggtggtcaacgattacgaaagccgccttcttcaagcccgtactggctggaacgagcaggacattgttagccgcgtgcaggcgtatatcaccacgcaaggttcggctggagccgtggtaatgacaccggagaagcgctacgttattccggctgctaaagcttctcgtgtcgttgatccaactggttgcggcgacgcgtttcgcgccggcctgatctatggtattcagcatgaatatgattggttgaccattggccgcatgggaaacttaatgggtgcgctgaaagtggaacaccctggcggccaaaatcagcgtttcacctttgccgaattcaacgaccggttcaaacaatattttggctacgcgctc

SEQ ID NO: 2086 - protein, 321 aa, synthetic construct
  REGION 1..321: note = variant of adenosine kinase from Xanthemonas campestris
MHHHHHHGGSGMSALICGSLAYDNIMWMPDHFKNHILPDRVHRLNVSFLVFDMRREFGGCAGNIAYNLHLLGGRPIVMATVGQDFGPYREHFETLGIDLSRVKIIDDLSTPQGFITTDMDQNQITLFHSGAMMRSYENHVRDVPGVTLGLVGPDGREGMIQNAEEFAAMGIPFIFDPGQAVPLFSGPELREFIEQADYVVVNDYESRLLQARTGWNEQDIVSRVQAYITTQGSAGAVVMTPEKRYVIPAAKASRVVDPTGCGDAFRAGLIYGIQHEYDWLTIGRMGNLMGALKVEHPGGQNQRFTFAEFNDRFKQYFGYAL

SEQ ID NO: 2087 - DNA, 963 bp, synthetic construct
  misc_feature 1..963: note = variant of adenosine kinase from Xanthemonas campestris
  source 1..963: mol_type = other DNA
atgcatcatcaccatcaccatggggggtccggtatgagtgcactcatttgcggttctttagcgtatgataacatcatggggtttccggactatttcaagaaccatattctgcccgatcgtgttcaccgcctcaatgtcagctttctggtatttgacatgcgtcgtgaatttggaggctgtgccggcaacattgcgtacaatctgcatctgttgggtggtcgcccgatcgtaatggctacggtgggccaagatttcggtccgtatcgcgaacacttcgaaactctgggcattgacttatcccgcgtcaagatcatcgatgatctgagtacaccgcaggggttcattaccaccgacatggatcaaaaccagattacgctgtttcacagcggcgcaatgatgcgttcgtacgaaaatcacgttcgtgatgtgccgggtgttaccttgggcctcgtaggtcctgatggccgcgagggcatgatccaaaatgccgaagaatttgctgctatgggcattccgttcatttttgacccaggtcaggcagtgcctctgttcagcggcccggaactgcgcgaatttatcgaacaggcggactatgtggtggtcaacgattacgaaagccgccttcttcaagcccgtactggctggaacgagcaggacattgttagccgcgtgcaggcgtatatcaccacgcaaggttcggctggagccgtggtaatgacaccggagaagcgctttgttattccggctgctaaagcttctcgtgtcgttgatccaactggttgcggcgacgcgtttcgcgccggcctgatctatggtattcagcatgaatatgattggttgaccattggccgcatgggaaacttaatgggtgcgctgaaagtggaacaccctggcggccaaaatcagcgtttcacctttgccgaattcaacgaccggttcaaacaatattttggctacgcgctc

SEQ ID NO: 2088 - protein, 321 aa, synthetic construct
  REGION 1..321: note = variant of adenosine kinase from Xanthemonas campestris
MHHHHHHGGSGMSALICGSLAYDNIMGFPDYFKNHILPDRVHRLNVSFLVFDMRREFGGCAGNIAYNLHLLGGRPIVMATVGQDFGPYREHFETLGIDLSRVKIIDDLSTPQGFITTDMDQNQITLFHSGAMMRSYENHVRDVPGVTLGLVGPDGREGMIQNAEEFAAMGIPFIFDPGQAVPLFSGPELREFIEQADYVVVNDYESRLLQARTGWNEQDIVSRVQAYITTQGSAGAVVMTPEKRFVIPAAKASRVVDPTGCGDAFRAGLIYGIQHEYDWLTIGRMGNLMGALKVEHPGGQNQRFTFAEFNDRFKQYFGYAL

SEQ ID NO: 2089 - DNA, 963 bp, synthetic construct
  misc_feature 1..963: note = variant of adenosine kinase from Xanthemonas campestris
  source 1..963: mol_type = other DNA
atgcatcatcaccatcaccatggggggtccggtatgagtgcactcatttgcggttctttagcgtatgataacatcatgtggatgccggactatttcaagaaccatattctgcccgatcgtgttcaccgcctcaatgtcagctttctggtatttgacatgcgtcgtgaatttggaggctgtgccggcaacattgcgtacaatctgcatctgttgggtggtcgcccgatcgtaatggctacggtgggccaagatttcggtccgtatcgcgaacacttcgaaactctgggcattgacttatcccgcgtcaagatcatcgatgatctgagtacaccgcaggggttcattaccaccgacatggatcaaaaccagattacgctgtttcacagcggcgcaatgatgcgttcgtacgaaaatcacgttcgtgatgtgccgggtgttaccttgggcctcgtaggtcctgatggccgcgagggcatgatccaaaatgccgaagaatttgctgctatgggcattccgttcatttttgacccaggtcaggcagtgcctctgttcagcggcccggaactgcgcgaatttatcgaacaggcggactatgtggtggtcaacgattacgaaagccgccttcttcaagcccgtactggctggaacgagcaggacattgttagccgcgtgcaggcgtatatcaccacgcaaggttcggctggagccgtggtaatgacaccggagaagcgctatgttattccggctgctaaagcttctcgtgtcgttgatccaactggttgcggcgacgcgtttcgcgccggcctgatctatggtattcagcatgaatatgattggttgaccattggccgcatgggaaacttaatgggtgcgctgaaagtggaacaccctggcggccaaaatcagcgtttcacctttgccgaattcaacgaccggttcaaacaatattttggctacgcgctc

SEQ ID NO: 2090 - protein, 321 aa, synthetic construct
  REGION 1..321: note = variant of adenosine kinase from Xanthemonas campestris
MHHHHHHGGSGMSALICGSLAYDNIMWMPDYFKNHILPDRVHRLNVSFLVFDMRREFGGCAGNIAYNLHLLGGRPIVMATVGQDFGPYREHFETLGIDLSRVKIIDDLSTPQGFITTDMDQNQITLFHSGAMMRSYENHVRDVPGVTLGLVGPDGREGMIQNAEEFAAMGIPFIFDPGQAVPLFSGPELREFIEQADYVVVNDYESRLLQARTGWNEQDIVSRVQAYITTQGSAGAVVMTPEKRYVIPAAKASRVVDPTGCGDAFRAGLIYGIQHEYDWLTIGRMGNLMGALKVEHPGGQNQRFTFAEFNDRFKQYFGYAL

SEQ ID NO: 2091 - DNA, 963 bp, synthetic construct
  misc_feature 1..963: note = variant of adenosine kinase from Xanthemonas campestris
  source 1..963: mol_type = other DNA
atgcatcatcaccatcaccatggggggtccggtatgagtgcactcatttgcggttctttagcgtatgataacatcatggggtttccggactatttcaagaaccatattctgcccgatcgtgttcaccgcctcaatgtcagctttctggtatttgacatgcgtcgtgaatttggaggctgtgccggcaacattgcgtacaatctgcatctgttgggtggtcgcccgatcgtaatggctacggtgggccaagatttcggtccgtatcgcgaacacttcgaaactctgggcattgacttatcccgcgtcaagatcatcgatgatctgagtacaccgcaggggttcattaccaccgacatggatcaaaaccagattacgctgtttcacagcggcgcaatgatgcgttcgtacgaaaatcacgttcgtgatgtgccgggtgttaccttgggcctcgtaggtcctgatggccgcgagggcatgatccaaaatgccgaagaatttgctgctatgggcattccgttcatttttgacccaggtcaggcagtgcctctgttcagcggcccggaactgcgcgaatttatcgaacaggcggactatgtggtggtcaacgattacgaaagccgccttcttcaagcccgtactggctggaacgagcaggacattgttagccgcgtgcaggcgtatatcaccacgcaaggttcggctggagccgtggtaatgacaccggagaagcgctacgttattccggctgctaaagcttctcgtgtcgttgatccaactggttgcggcgacgcgtttcgcgccggcctgatctatggtattcagcatgaatatgattggttgaccattggccgcatgggaaacttaatgggtgcgctgaaagtggaacaccctggcggccaaaatcagcgtttcacctttgccgaattcaacgaccggttcaaacaatattttggctacgcgctc

SEQ ID NO: 2092 - protein, 321 aa, synthetic construct
  REGION 1..321: note = variant of adenosine kinase from Xanthemonas campestris
MHHHHHHGGSGMSALICGSLAYDNIMGFPDYFKNHILPDRVHRLNVSFLVFDMRREFGGCAGNIAYNLHLLGGRPIVMATVGQDFGPYREHFETLGIDLSRVKIIDDLSTPQGFITTDMDQNQITLFHSGAMMRSYENHVRDVPGVTLGLVGPDGREGMIQNAEEFAAMGIPFIFDPGQAVPLFSGPELREFIEQADYVVVNDYESRLLQARTGWNEQDIVSRVQAYITTQGSAGAVVMTPEKRYVIPAAKASRVVDPTGCGDAFRAGLIYGIQHEYDWLTIGRMGNLMGALKVEHPGGQNQRFTFAEFNDRFKQYFGYAL

SEQ ID NO: 2093 - DNA, 963 bp, synthetic construct
  misc_feature 1..963: note = variant of adenosine kinase from Xanthemonas campestris
  source 1..963: mol_type = other DNA
atgcatcatcaccatcaccatggggggtccggtatgagtgcactcatttgcggttctttagcgtatgataacatcatgtggtttccggactatttcaagaaccatattctgcccgatcgtgttcaccgcctcaatgtcagctttctggtatttgacatgcgtcgtgaatttggaggctgtgccggcaacattgcgtacaatctgcatctgttgggtggtcgcccgatcgtaatggctacggtgggccaagatttcggtccgtatcgcgaacacttcgaaactctgggcattgacttatcccgcgtcaagatcatcgatgatctgagtacaccgcaggggttcattaccaccgacatggatcaaaaccagattacgctgtttcacagcggcgcaatgatgcgttcgtacgaaaatcacgttcgtgatgtgccgggtgttaccttgggcctcgtaggtcctgatggccgcgagggcatgatccaaaatgccgaagaatttgctgctatgggcattccgttcatttttgacccaggtcaggcagtgcctctgttcagcggcccggaactgcgcgaatttatcgaacaggcggactatgtggtggtcaacgattacgaaagccgccttcttcaagcccgtactggctggaacgagcaggacattgttagccgcgtgcaggcgtatatcaccacgcaaggttcggctggagccgtggtaatgacaccggagaagcgctacgttattccggctgctaaaacctctcgtgtcgttgatccaactggttgcggcgacgcgtttcgcgccggcctgatctatggtattcagcatggatatgattggttgaccattggccgcatgggaaacttaatgggtgcgctgaaagtggaacaccctggcggccaaaatcagcgtttcacctttgccgaattcaacgaccggttcaaacaatattttggctacgcgctc

SEQ ID NO: 2094 - protein, 321 aa, synthetic construct; identical to SEQ ID NO: 2002
  REGION 1..321: note = variant of adenosine kinase from Xanthemonas campestris

SEQ ID NO: 2095 - DNA, 963 bp, synthetic construct
  misc_feature 1..963: note = variant of adenosine kinase from Xanthemonas campestris
  source 1..963: mol_type = other DNA
atgcatcatcaccatcaccatggggggtccggtatgagtgcactcatttgcggttctttagcgtatgataacatcttttggatgccggaccatttcaagaaccatattctgcccgatcgtgttcaccgcctcaatgtcagctttctggtatttgacatgcgtcgtgaatttggaggctgtgccggcaacattgcgtacaatctgcatctgttgggtggtcgcccgatcgtaatggctacggtgggccaagatttcggtccgtatcgcgaacacttcgaaactctgggcattgacttatcccgcgtcaagatcatcgatgatctgagtacaccgcaggggttcattaccaccgacatggatcaaaaccagattacgctgtttcacagcggcgcaatgatgcgttcgtacgaaaatcacgttcgtgatgtgccgggtgttaccttgggcctcgtaggtcctgatggccgcgagggcatgatccaaaatgccgaagaatttgctgctatgggcattccgttcatttttgacccaggtcaggcagtgcctctgttcagcggcccggaactgcgcgaatttatcgaacaggcggactatgtggtggtcaacgattacgaaagccgccttcttcaagcccgtactggctggaacgagcaggacattgttagccgcgtgcaggcgtatatcaccacgcaaggttcggctggagccgtggtaatgacaccggagaagcgctacgttattccggctgctaaagcttctcgtgtcgttgatccaactggttgcggcgacgcgtttcgcgccggcctgatctatggtattcagcatgaatatgattggttgaccattggccgcatgggaaacttaatgggtgcgctgaaagtggaacaccctggcggccaaaatcagcgtttcacctttgccgaattcaacgaccggttcaaacaatattttggctacgcgctc

SEQ ID NO: 2096 - protein, 321 aa, synthetic construct
  REGION 1..321: note = variant of adenosine kinase from Xanthemonas campestris
MHHHHHHGGSGMSALICGSLAYDNIFWMPDHFKNHILPDRVHRLNVSFLVFDMRREFGGCAGNIAYNLHLLGGRPIVMATVGQDFGPYREHFETLGIDLSRVKIIDDLSTPQGFITTDMDQNQITLFHSGAMMRSYENHVRDVPGVTLGLVGPDGREGMIQNAEEFAAMGIPFIFDPGQAVPLFSGPELREFIEQADYVVVNDYESRLLQARTGWNEQDIVSRVQAYITTQGSAGAVVMTPEKRYVIPAAKASRVVDPTGCGDAFRAGLIYGIQHEYDWLTIGRMGNLMGALKVEHPGGQNQRFTFAEFNDRFKQYFGYAL

SEQ ID NO: 2097 - DNA, 963 bp, synthetic construct
  misc_feature 1..963: note = variant of adenosine kinase from Xanthemonas campestris
  source 1..963: mol_type = other DNA
atgcatcatcaccatcaccatggggggtccggtatgagtgcactcatttgcggttctttagcgtatgataacatcatggggtttccggactatttcaagaaccatattctgcccgatcgtgttcatcgcctcaatgtcagctttctggtatttgacatgcgtcgtgaatttggaggctgtgccggcaacattgcgtacaatctgcatctgttgggtggtcgcccgatcgtaatggctacggtgggccaagatttcggtccgtatcgcgaacacttcgaaactctgggcattgacttatcccgcgtcaagatcatcgatgatctgagtacaccgcaggggttcattaccaccgacatggatcaaaaccagattacgctgtttcacagcggcgcaatgatgcgttcgtacgaaaatcacgttcgtgatgtgccgggtgttaccttgggcctcgtaggtcctgatggccgcgagggcatgatccaaaatgccgaagaatttgctgctatgggcattccgttcatttttgacccaggtcaggcagtgcctctgttcagcggcccggaactgcgcgaatttatcgaacaggcggactatgtggtggtcaacgattacgaaagccgccttcttcaagcccgtactggctggaacgagcaggacattgttagccgcgtgcaggcgtatatcaccacgcaaggttcggctggagccaaagtaatgacaccggagaagcgctatgttattccggctgctaaagcttctcgtgtcgttgatccaactggttgcggcgacgcgtttcgcgccggcctgatctatggtattcagcatgaatatgattggttgaccattggccgcatgggaaacttaatgggtgcgctgaaagtggaacaccctggcggccaaaatcagcgtttcacctttgccgaattcaacgaccggttcaaacaatattttggctacgcgctc

SEQ ID NO: 2098 - protein, 321 aa, synthetic construct
  REGION 1..321: note = variant of adenosine kinase from Xanthemonas campestris
MHHHHHHGGSGMSALICGSLAYDNIMGFPDYFKNHILPDRVHRLNVSFLVFDMRREFGGCAGNIAYNLHLLGGRPIVMATVGQDFGPYREHFETLGIDLSRVKIIDDLSTPQGFITTDMDQNQITLFHSGAMMRSYENHVRDVPGVTLGLVGPDGREGMIQNAEEFAAMGIPFIFDPGQAVPLFSGPELREFIEQADYVVVNDYESRLLQARTGWNEQDIVSRVQAYITTQGSAGAKVMTPEKRYVIPAAKASRVVDPTGCGDAFRAGLIYGIQHEYDWLTIGRMGNLMGALKVEHPGGQNQRFTFAEFNDRFKQYFGYAL

SEQ ID NO: 2099 - DNA, 963 bp, synthetic construct
  misc_feature 1..963: note = variant of adenosine kinase from Xanthemonas campestris
  source 1..963: mol_type = other DNA
atgcatcatcaccatcaccatggggggtccggtatgagtgcactcatttgcggttctttagcgtatgataacatcatggggtttccggactatttcaagaaccatattctgcccgatcgtgttcaccgcctcaatgtcagctttctggtatttgacatgcgtcgtgaatttggaggctgtgccggcaacattgcgtacaatctgcatctgttgggtggtcgcccgatcgtaatggctacggtgggccaagatttcggtccgtatcgcgaacacttcgaaactctgggcattgacttatcccgcgtcaagatcatcgatgatctgagtacaccgcaggggttcattaccaccgacatggatcaaaaccagattacggcgtttcacagcggcgcaatgatgcgttcgtacgaaaatcacgttcgtgatgtgccgggtgttaccttgggcctcgtaggtcctgatggccgcgagggcatgatccaaaatgccgaagaatttgctgctatgggcattccgttcatttttgacccaggtcaggcagtgcctctgttcagcggcccggaactgcgcgaatttatcgaacaggcggactatgtggtggtcaacgattacgaaagccgccttcttcaagcccgtactggctggaacgagcaggacattgttagccgcgtgcaggcgtatatcaccacgcaaggttcggctggagccaaagtaatgacaccggagaagcgctacgttattccggctgctaaagcttctcgtgtcgttgatccaactggttgcggcgacgcgtttcgcgccggcctgatctatggtattcagcatgaatatgattggttgaccattggccgcatgggaaacttaatgggtgcgctgaaagtggaacaccctggcggccaaaatcagcgtttcacctttgccgaattcaacgaccggttcaaacaatattttggctacgcgctc

SEQ ID NO: 2100 - protein, 321 aa, synthetic construct
  REGION 1..321: note = variant of adenosine kinase from Xanthemonas campestris
MHHHHHHGGSGMSALICGSLAYDNIMGFPDYFKNHILPDRVHRLNVSFLVFDMRREFGGCAGNIAYNLHLLGGRPIVMATVGQDFGPYREHFETLGIDLSRVKIIDDLSTPQGFITTDMDQNQITAFHSGAMMRSYENHVRDVPGVTLGLVGPDGREGMIQNAEEFAAMGIPFIFDPGQAVPLFSGPELREFIEQADYVVVNDYESRLLQARTGWNEQDIVSRVQAYITTQGSAGAKVMTPEKRYVIPAAKASRVVDPTGCGDAFRAGLIYGIQHEYDWLTIGRMGNLMGALKVEHPGGQNQRFTFAEFNDRFKQYFGYAL

SEQ ID NO: 2101 - DNA, 963 bp, synthetic construct
  misc_feature 1..963: note = variant of adenosine kinase from Xanthemonas campestris
  source 1..963: mol_type = other DNA
atgcatcatcaccatcaccatggggggtccggtatgagtgcactcatttgcggttctttagcgtatgataacatctttgggatgccggactatttcaagaaccatattctgcccgatcgtgttcaccgcctcaatgtcagctttctggtatttgacatgcgtcgtgaatttggaggctgtgccggcaacattgcgtacaatctgcatctgttgggtggtcgcccgatcgtaatggctacggtgggccaagatttcggtccgtatcgcgaacacttcgaaactctgggcattgacttatcccgcgtcaagatcatcgatgatctgagtacaccgcaggggttcattaccaccgacatggatcaaaaccagattacgctgtttcacagcggcgcaatgatgcgttcgtacgaaaatcacgttcgtgatgtgccgggtgttaccttgggcctcgtaggtcctgatggccgcgagggcatgatccaaaatgccgaagaatttgctgctatgggcattccgttcatttttgacccaggtcaggcagtgcctctgttcagcggcccggaactgcgcgaatttatcgaacaggcggactatgtggtggtcaacgattacgaaagccgccttcttcaagcccgtactggctggaacgagcaggacattgttagccgcgtgcaggcgtatatcaccacgcaaggttcggctggagccgtggtaatgacaccggagaagcgctatgttattccggctgctaaagcttctcgtgtcgttgatccaactggttgcggcgacgcgtttcgcgccggcctgatctatggtattcagcatgaatatgattggttgaccattggccgcatgggaaacttaatgggtgcgctgaaagtggaacaccctggcggccaaaatcagcgtttcacctttgccgaattcaacgaccggttcaaacaatattttggctacgcgctc

SEQ ID NO: 2102 - protein, 321 aa, synthetic construct
  REGION 1..321: note = variant of adenosine kinase from Xanthemonas campestris
MHHHHHHGGSGMSALICGSLAYDNIFGMPDYFKNHILPDRVHRLNVSFLVFDMRREFGGCAGNIAYNLHLLGGRPIVMATVGQDFGPYREHFETLGIDLSRVKIIDDLSTPQGFITTDMDQNQITLFHSGAMMRSYENHVRDVPGVTLGLVGPDGREGMIQNAEEFAAMGIPFIFDPGQAVPLFSGPELREFIEQADYVVVNDYESRLLQARTGWNEQDIVSRVQAYITTQGSAGAVVMTPEKRYVIPAAKASRVVDPTGCGDAFRAGLIYGIQHEYDWLTIGRMGNLMGALKVEHPGGQNQRFTFAEFNDRFKQYFGYAL

SEQ ID NO: 2103 - DNA, 963 bp, synthetic construct
  misc_feature 1..963: note = variant of adenosine kinase from Xanthemonas campestris
  source 1..963: mol_type = other DNA
atgcatcatcaccatcaccatggggggtccggtatgagtgcactcatttgcggttctttagcgtatgataacatcatgcggtttccggactatttcaagaaccatattctgcccgatcgtgttcaccgcctcaatgtcagctttctggtatttgacatgcgtcgtgaatttggaggctgtgccggcaacattgcgtacaatctgcatctgttgggtggtcgcccgatcgtaatggctacggtgggccaagatttcggtccgtatcgcgaacacttcgaaactctgggcattgacttatcccgcgtcaagatcatcgatgatctgagtacaccgcaggggttcattaccaccgacatggatcaaaaccagattacgctgtttcacagcggcgcaatgatgcgttcgtacgaaaatcacgttcgtgatgtgccgggtgttaccttgggcctcgtaggtcctgatggccgcgagggcatgatccaaaatgccgaagaatttgctgctatgggcattccgttcatttttgacccaggtcaggcagtgcctctgttcagcggcccggaactgcgcgaatttatcgaacaggcggactatgtggtggtcaacgattacgaaagccgccttcttcaagcccgtactggctggaacgagcaggacattgttagccgcgtgcaggcgtatatcaccacgcaaggttcggctggagccgtggtaatgacaccggagaagcgctttgttattccggctgctaaagcttctcgtgtcgttgatccaactggttgcggcgacgcgtttcgcgccggcctgatctatggtattcagcatgaatatgattggttgaccattggccgcatgggaaacttaatgggtgcgctgaaagtggaacaccctggcggccaaaatcagcgtttcacctttgccgaattcaacgaccggttcaaacaatattttggctacgcgctc

SEQ ID NO: 2104 - protein, 321 aa, synthetic construct
  REGION 1..321: note = variant of adenosine kinase from Xanthemonas campestris
MHHHHHHGGSGMSALICGSLAYDNIMRFPDYFKNHILPDRVHRLNVSFLVFDMRREFGGCAGNIAYNLHLLGGRPIVMATVGQDFGPYREHFETLGIDLSRVKIIDDLSTPQGFITTDMDQNQITLFHSGAMMRSYENHVRDVPGVTLGLVGPDGREGMIQNAEEFAAMGIPFIFDPGQAVPLFSGPELREFIEQADYVVVNDYESRLLQARTGWNEQDIVSRVQAYITTQGSAGAVVMTPEKRFVIPAAKASRVVDPTGCGDAFRAGLIYGIQHEYDWLTIGRMGNLMGALKVEHPGGQNQRFTFAEFNDRFKQYFGYAL

SEQ ID NO: 2105 - DNA, 963 bp, synthetic construct
  misc_feature 1..963: note = variant of adenosine kinase from Xanthemonas campestris
  source 1..963: mol_type = other DNA
atgcatcatcaccatcaccatggggggtccggtatgagtgcactcatttgcggttctttagcgtatgataacatcatgtggatgccggactatttcaagaaccatattctgcccgatcgtgttaatcgcctcaatgtcagctttctggtatttgacatgcgtcgtgaatttggaggctgtgccggcaacattgcgtacaatctgcatctgttgggtggtcgcccgatcgtaatggctacggtgggccaagatttcggtccgtatcgcgaacacttcgaaactctgggcattgacttatcccgcgtcaagatcatcgatgatctgagtacaccgcaggggttcattaccaccgacatggatcaaaaccagattacggcgtttcacagcggcgcaatgatgcgttcgtacgaaaatcacgttcgtgatgtgccgggtgttaccttgggcctcgtaggtcctgatggccgcgagggcatgatccaaaatgccgaagaatttgctgctatgggcattccgttcatttttgacccaggtcaggcagtgcctctgttcagcggcccggaactgcgcgaatttatcgaacaggcggactatgtggtggtcaacgattacgaaagccgccttcttcaagcccgtactggctggaacgagcaggacattgttagccgcgtgcaggcgtatatcaccacgcaaggttcggctggagccgtggtaatgacaccggagaagcgctttgttattccggctgctaaagcttctcgtgtcgttgatccaactggttgcggcgacgcgtttcgcgccggcctgatctatggtattcagcatgaatatgattggttgaccattggccgcatgggaaacttaatgggtgcgctgaaagtggaacaccctggcggccaaaatcagcgtttcacctttgccgaattcaacgaccggttcaaacaatattttggctacgcgctc

SEQ ID NO: 2106 - protein, 321 aa, synthetic construct
  REGION 1..321: note = variant of adenosine kinase from Xanthemonas campestris
MHHHHHHGGSGMSALICGSLAYDNIMWMPDYFKNHILPDRVNRLNVSFLVFDMRREFGGCAGNIAYNLHLLGGRPIVMATVGQDFGPYREHFETLGIDLSRVKIIDDLSTPQGFITTDMDQNQITAFHSGAMMRSYENHVRDVPGVTLGLVGPDGREGMIQNAEEFAAMGIPFIFDPGQAVPLFSGPELREFIEQADYVVVNDYESRLLQARTGWNEQDIVSRVQAYITTQGSAGAVVMTPEKRFVIPAAKASRVVDPTGCGDAFRAGLIYGIQHEYDWLTIGRMGNLMGALKVEHPGGQNQRFTFAEFNDRFKQYFGYAL

SEQ ID NO: 2107 - DNA, 963 bp, synthetic construct
  misc_feature 1..963: note = variant of adenosine kinase from Xanthemonas campestris
  source 1..963: mol_type = other DNA
atgcatcatcaccatcaccatggggggtccggtatgagtgcactcatttgcggttctttagcgtatgataacatcatgtggatgccggactatttcaagaaccatattctgcccgatcgtgttaatcgcctcaatgtcagctttctggtatttgacatgcgtcgtgaatttggaggctgtgccggcaacattgcgtacaatctgcatctgttgggtggtcgcccgatcgtaatggctacggtgggccaagatttcggtccgtatcgcgaacacttcgaaactctgggcattgacttatcccgcgtcaagatcatcgatgatctgagtacaccgcaggggttcattaccaccgacatggatcaaaaccagattacgctgtttcacagcggcgcaatgatgcgttcgtacgaaaatcacgttcgtgatgtgccgggtgttaccttgggcctcgtaggtcctgatggccgcgagggcatgatccaaaatgccgaagaatttgctgctatgggcattccgttcatttttgacccaggtcaggcagtgcctctgttcagcggcccggaactgcgcgaatttatcgaacaggcggactatgtggtggtcaacgattacgaaagccgccttcttcaagcccgtactggctggaacgagcaggacattgttagccgcgtgcaggcgtatatcaccacgcaaggttcggctggagccgtggtaatgacaccggagaagcgctttgttattccggctgctaaagcttctcgtgtcgttgatccaactggttgcggcgacgcgtttcgcgccggcctgatctatggtattcagcatgaatatgattggttgaccattggccgcatgggaaacttaatgggtgcgctgaaagtggaacaccctggcggccaaaatcagcgtttcacctttgccgaattcaacgaccggttcaaacaatattttggctacgcgctc

SEQ ID NO: 2108 - protein, 321 aa, synthetic construct
  REGION 1..321: note = variant of adenosine kinase from Xanthemonas campestris
MHHHHHHGGSGMSALICGSLAYDNIMWMPDYFKNHILPDRVNRLNVSFLVFDMRREFGGCAGNIAYNLHLLGGRPIVMATVGQDFGPYREHFETLGIDLSRVKIIDDLSTPQGFITTDMDQNQITLFHSGAMMRSYENHVRDVPGVTLGLVGPDGREGMIQNAEEFAAMGIPFIFDPGQAVPLFSGPELREFIEQADYVVVNDYESRLLQARTGWNEQDIVSRVQAYITTQGSAGAVVMTPEKRFVIPAAKASRVVDPTGCGDAFRAGLIYGIQHEYDWLTIGRMGNLMGALKVEHPGGQNQRFTFAEFNDRFKQYFGYAL

SEQ ID NO: 2109 - DNA, 963 bp, synthetic construct
  misc_feature 1..963: note = variant of adenosine kinase from Xanthemonas campestris
  source 1..963: mol_type = other DNA
atgcatcatcaccatcaccatggggggtccggtatgagtgcactcatttgcggttctttagcgtatgataacatcatgtggtttccgggtcatttcgcgaacgatattctgcccgatcgtgttcaccgcctcaatgtcagctttctggtatttgacatgcgtcgtgaatttggaggctgtgccggcaacattgcgtacaatctgcatctgttgggtggtcgcccgatcgtaatggctacggtgggccaagatttcggtccgtatcgcgaacacttcgaaactctgggcattgacttatcccgcgtcaagatcatcgatgatctgagtacaccgcaggggttcattaccaccgacatggatcaaaaccagattacggcgtttcacagcggcgcaatgatgcgttcgtacgaaaatcacgttcgtgatgtgccgggtgttaccttgggcctcgtaggtcctgatggccgcgagggcatgatccaaaatgccgaagaatttgctgctatgggcattccgttcatttttgacccaggtcaggcagtgcctctgttcagcggcccggaactgcgcgaatttatcgaacaggcggactatgtggtggtcaacgattacgaaagccgccttcttcaagcccgtactggctggaacgagaacgacattgttagccgcgtgcaggcgtatatcaccacgcaaggttcggctggagccgtggtaatgacaccggagaagcgctacgttattccggctgctaaagcctctcgtgtcgttgatccaactggttgcggcgacgcgtttcgcgccggcctgatctatggtattcagcatgaatatgattggttgaccattggccgcatgggaaacttaatgggtgcgctgaaagtggaacaccctggcggccaaaatcagcgtttcacctttgccgaattcaacgaccggttcaaacaatattttggctacgcgctc

SEQ ID NO: 2110 - protein, 321 aa, synthetic construct
  REGION 1..321: note = variant of adenosine kinase from Xanthemonas campestris
MHHHHHHGGSGMSALICGSLAYDNIMWFPGHFANDILPDRVHRLNVSFLVFDMRREFGGCAGNIAYNLHLLGGRPIVMATVGQDFGPYREHFETLGIDLSRVKIIDDLSTPQGFITTDMDQNQITAFHSGAMMRSYENHVRDVPGVTLGLVGPDGREGMIQNAEEFAAMGIPFIFDPGQAVPLFSGPELREFIEQADYVVVNDYESRLLQARTGWNENDIVSRVQAYITTQGSAGAVVMTPEKRYVIPAAKASRVVDPTGCGDAFRAGLIYGIQHEYDWLTIGRMGNLMGALKVEHPGGQNQRFTFAEFNDRFKQYFGYAL

SEQ ID NO: 2111 - DNA, 963 bp, synthetic construct
  misc_feature 1..963: note = variant of adenosine kinase from Xanthemonas campestris
  source 1..963: mol_type = other DNA
atgcatcatcaccatcaccatggggggtccggtatgagtgcactcatttgcggttctttagcgtatgataacatcatggggtttccggaccatttcaagaaccatattctgcccgatcgtgttcatcgcctcaatgtcagctttctggtatttgacatgcgtcgtgaatttggaggctgtgccggcaacattgcgtacaatctgcatctgttgggtggtcgcccgatcgtaatggctacggtgggccaagatttcggtccgtatcgcgaacacttcgaaactctgggcattgacttatcccgcgtcaagatcatcgatgatctgagtacaccgcaggggttcattaccaccgacatggatcaaaaccagattacggcgtttcacagcggcgcaatgatgcgttcgtacgaaaatcacgttcgtgatgtgccgggtgttaccttgggcctcgtaggtcctgatggccgcgagggcatgatccaaaatgccgaagaatttgctgctatgggcattccgttcatttttgacccaggtcaggcagtgcctctgttcagcggcccggaactgcgcgaatttatcgaacaggcggactatgtggtggtcaacgattacgaaagccgccttcttcaagcccgtactggctggaacgagcaggacattgttagccgcgtgcaggcgtatatcaccacgcaaggttcggctggagccgtggtaatgacaccggagaagcgctttgttattccggctgctaaagcttctcgtgtcgttgatccaactggttgcggcgacgcgtttcgcgccggcctgatctatggtattcagcatgaatatgattggttgaccattggccgcatgggaaacttaatgggtgcgctgaaagtggaacaccctggcggccaaaatcagcgtttcacctttgccgaattcaacgaccggttcaaacaatattttggctacgcgctc

SEQ ID NO: 2112 - protein, 321 aa, synthetic construct
  REGION 1..321: note = variant of adenosine kinase from Xanthemonas campestris
MHHHHHHGGSGMSALICGSLAYDNIMGFPDHFKNHILPDRVHRLNVSFLVFDMRREFGGCAGNIAYNLHLLGGRPIVMATVGQDFGPYREHFETLGIDLSRVKIIDDLSTPQGFITTDMDQNQITAFHSGAMMRSYENHVRDVPGVTLGLVGPDGREGMIQNAEEFAAMGIPFIFDPGQAVPLFSGPELREFIEQADYVVVNDYESRLLQARTGWNEQDIVSRVQAYITTQGSAGAVVMTPEKRFVIPAAKASRVVDPTGCGDAFRAGLIYGIQHEYDWLTIGRMGNLMGALKVEHPGGQNQRFTFAEFNDRFKQYFGYAL

SEQ ID NO: 2113 - DNA, 963 bp, synthetic construct
  misc_feature 1..963: note = variant of adenosine kinase from Xanthemonas campestris
  source 1..963: mol_type = other DNA
atgcatcatcaccatcaccatggggggtccggtatgagtgcactcatttgcggttctttagcgtatgataacatcatgtggctgccggaccatttcaagaaccatattctgcccgatcgtgttcaccgcctcaatgtcagctttctggtatttgacatgcgtcgtgaatttggaggctgtgccggcaacattgcgtacaatctgcatctgttgggtggtcgcccgatcgtaatggctacggtgggccaagatttcggtccgtatcgcgaacacttcgaaactctgggcattgacttatcccgcgtcaagatcatcgatgatctgagtacaccgcaggggttcattaccaccgacatggatcaaaaccagattacgctgtttcacagcggcgcaatgatgcgttcgtacgaaaatcacgttcgtgatgtgccgggtgttaccttgggcctcgtaggtcctgatggccgcgagggcatgatccaaaatgccgaagaatttgctgctatgggcattccgttcatttttgacccaggtcaggcagtgcctctgttcagcggcccggaactgcgcgaatttatcgaacaggcggactatgtggtggtcaacgattacgaaagccgccttcttcaagcccgtactggctggaacgagcaggacattgttagccgcgtgcaggcgtatatcaccacgcaaggttcggctggagccgtggtaacgacaccggagaagcgctatgttattccggctgctaaagcttctcgtgtcgttgatccaactggttgcggcgacgcgtttcgcgccggcctgatctatggtattcagcatgaatatgattggttgaccattggccgcatgggaaacttaatgggtgcgctgaaagtggaacaccctggcggccaaaatcagcgtttcacctttgccgaattcaacgaccggttcaaacaatattttggctacgcgctc

SEQ ID NO: 2114 - protein, 321 aa, synthetic construct
  REGION 1..321: note = variant of adenosine kinase from Xanthemonas campestris
MHHHHHHGGSGMSALICGSLAYDNIMWLPDHFKNHILPDRVHRLNVSFLVFDMRREFGGCAGNIAYNLHLLGGRPIVMATVGQDFGPYREHFETLGIDLSRVKIIDDLSTPQGFITTDMDQNQITLFHSGAMMRSYENHVRDVPGVTLGLVGPDGREGMIQNAEEFAAMGIPFIFDPGQAVPLFSGPELREFIEQADYVVVNDYESRLLQARTGWNEQDIVSRVQAYITTQGSAGAVVTTPEKRYVIPAAKASRVVDPTGCGDAFRAGLIYGIQHEYDWLTIGRMGNLMGALKVEHPGGQNQRFTFAEFNDRFKQYFGYAL

SEQ ID NO: 2115 - DNA, 963 bp, synthetic construct
  misc_feature 1..963: note = variant of adenosine kinase from Xanthemonas campestris
  source 1..963: mol_type = other DNA
atgcatcatcaccatcaccatggggggtccggtatgagtgcactcatttgcggttctttagcgtatgataacatcatgtggtttccggaccatttcaagaaccatattctgcccgatcgtgttcaccgcctcaatgtcagctttctggtatttgacatgcgtcgtgaatttggaggctgtgccggcaacattgcgtacaatctgcatctgttgggtggtcgcccgatcgtaatggctacggtgggccaagatttcggtccgtatcgcgaacacttcgaaactctgggcattgacttatcccgcgtcaagatcatcgatgatctgagtacaccgcaggggttcattaccaccgacatggatcaaaaccagattacggcgtttcacagcggcgcaatgatgcgttcgtacgaaaatcacgttcgtgatgtgccgggtgttaccttgggcctcgtaggtcctgatggccgcgagggcatgatccaaaatgccgaagaatttgctgctatgggcattccgttcatttttgacccaggtcaggcagtgcctctgttcagcggcccggaactgcgcgaatttatcgaacaggcggactatgtggtggtcaacgattacgaaagccgccttcttcaagcccgtactggctggaacgagcaggacattgttagccgcgtgcaggcgtatatcaccacgcaaggttcggctggagccgtggtaatgacaccggagaagcgctacgttattccggctgctaaagcttctcgtgtcgttgatccaactggttgcggcgacgcgtttcgcgccggcctgatctatggtattcagcatgaatatgattggttgaccattggccgcatgggaaacttaatgggtgcgctgaaagtggaacaccctggcggccaaaatcagcgtttcacctttgccgaattcaacgaccggttcaaacaatattttggctacgcgctc

SEQ ID NO: 2116 - protein, 321 aa, synthetic construct
  REGION 1..321: note = variant of adenosine kinase from Xanthemonas campestris
MHHHHHHGGSGMSALICGSLAYDNIMWFPDHFKNHILPDRVHRLNVSFLVFDMRREFGGCAGNIAYNLHLLGGRPIVMATVGQDFGPYREHFETLGIDLSRVKIIDDLSTPQGFITTDMDQNQITAFHSGAMMRSYENHVRDVPGVTLGLVGPDGREGMIQNAEEFAAMGIPFIFDPGQAVPLFSGPELREFIEQADYVVVNDYESRLLQARTGWNEQDIVSRVQAYITTQGSAGAVVMTPEKRYVIPAAKASRVVDPTGCGDAFRAGLIYGIQHEYDWLTIGRMGNLMGALKVEHPGGQNQRFTFAEFNDRFKQYFGYAL

SEQ ID NO: 2117 - DNA, 963 bp, synthetic construct
  misc_feature 1..963: note = variant of adenosine kinase from Xanthemonas campestris
  source 1..963: mol_type = other DNA
atgcatcatcaccatcaccatggggggtccggtatgagtgcactcatttgcggttctttagcgtatgataacatctttcggtttccggactatttcaagaaccatattctgcccgatcgtgttcaccgcctcaatgtcagctttctggtatttgacatgcgtcgtgaatttggaggctgtgccggcaacattgcgtacaatctgcatctgttgggtggtcgcccgatcgtaatggctacggtgggccaagatttcggtccgtatcgcgaacacttcgaaactctgggcattgacttatcccgcgtcaagatcatcgatgatctgagtacaccgcaggggttcattaccaccgacatggatcaaaaccagattacgctgtttcacagcggcgcaatgatgcgttcgtacgaaaatcacgttcgtgatgtgccgggtgttaccttgggcctcgtaggtcctgatggccgcgagggcatgatccaaaatgccgaagaatttgctgctatgggcattccgttcatttttgacccaggtcaggcagtgcctctgttcagcggcccggaactgcgcgaatttatcgaacaggcggactatgtggtggtcaacgattacgaaagccgccttcttcaagcccgtactggctggaacgagcaggacattgttagccgcgtgcaggcgtatatcaccacgcaaggttcggctggagccgtggtaatgacaccggagaagcgctacgttattccggctgctaaagcttctcgtgtcgttgatccaactggttgcggcgacgcgtttcgcgccggcctgatctatggtattcagcatgaatatgattggttgaccattggccgcatgggaaacttaatgggtgcgctgaaagtggaacaccctggcggccaaaatcagcgtttcacctttgccgaattcaacgaccggttcaaacaatattttggctacgcgctc

SEQ ID NO: 2118 - protein, 321 aa, synthetic construct
  REGION 1..321: note = variant of adenosine kinase from Xanthemonas campestris
MHHHHHHGGSGMSALICGSLAYDNIFRFPDYFKNHILPDRVHRLNVSFLVFDMRREFGGCAGNIAYNLHLLGGRPIVMATVGQDFGPYREHFETLGIDLSRVKIIDDLSTPQGFITTDMDQNQITLFHSGAMMRSYENHVRDVPGVTLGLVGPDGREGMIQNAEEFAAMGIPFIFDPGQAVPLFSGPELREFIEQADYVVVNDYESRLLQARTGWNEQDIVSRVQAYITTQGSAGAVVMTPEKRYVIPAAKASRVVDPTGCGDAFRAGLIYGIQHEYDWLTIGRMGNLMGALKVEHPGGQNQRFTFAEFNDRFKQYFGYAL

SEQ ID NO: 2119 - DNA, 963 bp, synthetic construct
  misc_feature 1..963: note = variant of adenosine kinase from Xanthemonas campestris
  source 1..963: mol_type = other DNA
atgcatcatcaccatcaccatggggggtccggtatgagtgcactcatttgcggttctttagcgtatgataacatcatgtggtttccggactatttcaagaaccatattctgcccgatcgtgttcatcgcctcaatgtcagctttctggtatttgacatgcgtcgtgaatttggaggctgtgccggcaacattgcgtacaatctgcatctgttgggtggtcgcccgatcgtaatggctacggtgggccaagatttcggtccgtatcgcgaacacttcgaaactctgggcattgacttatcccgcgtcaagatcatcgatgatctgagtacaccgcaggggttcattaccaccgacatggatcaaaaccagattacggcgtttcacagcggcgcaatgatgcgttcgtacgaaaatcacgttcgtgatgtgccgggtgttaccttgggcctcgtaggtcctgatggccgcgagggcatgatccaaaatgccgaagaatttgctgctatgggcattccgttcatttttgacccaggtcaggcagtgcctctgttcagcggcccggaactgcgcgaatttatcgaacaggcggactatgtggtggtcaacgattacgaaagccgccttcttcaagcccgtactggctggaacgagcaggacattgttagccgcgtgcaggcgtatatcaccacgcaaggttcggctggagccgtggtaatgacaccggagaagcgctttgttattccggctgctaaagcttctcgtgtcgttgatccaactggttgcggcgacgcgtttcgcgccggcctgatctatggtattcagcatgaatatgattggttgaccattggccgcatgggaaacttaatgggtgcgctgaaagtggaacaccctggcggccaaaatcagcgtttcacctttgccgaattcaacgaccggttcaaacaatattttggctacgcgctc

SEQ ID NO: 2120 - protein, 321 aa, synthetic construct
  REGION 1..321: note = variant of adenosine kinase from Xanthemonas campestris
MHHHHHHGGSGMSALICGSLAYDNIMWFPDYFKNHILPDRVHRLNVSFLVFDMRREFGGCAGNIAYNLHLLGGRPIVMATVGQDFGPYREHFETLGIDLSRVKIIDDLSTPQGFITTDMDQNQITAFHSGAMMRSYENHVRDVPGVTLGLVGPDGREGMIQNAEEFAAMGIPFIFDPGQAVPLFSGPELREFIEQADYVVVNDYESRLLQARTGWNEQDIVSRVQAYITTQGSAGAVVMTPEKRFVIPAAKASRVVDPTGCGDAFRAGLIYGIQHEYDWLTIGRMGNLMGALKVEHPGGQNQRFTFAEFNDRFKQYFGYAL

SEQ ID NO: 2121 - DNA, 963 bp, synthetic construct
  misc_feature 1..963: note = variant of adenosine kinase from Xanthemonas campestris
  source 1..963: mol_type = other DNA
atgcatcatcaccatcaccatggggggtccggtatgagtgcactcatttgcggttctttagcgtatgataacatcatggggtttccggactatttcaagaaccatattctgcccgatcgtgttcatcgcctcaatgtcagctttctggtatttgacatgcgtcgtgaatttggaggctgtgccggcaacattgcgtacaatctgcatctgttgggtggtcgcccgatcgtaatggctacggtgggccaagatttcggtccgtatcgcgaacacttcgaaactctgggcattgacttatcccgcgtcaagatcatcgatgatctgagtacaccgcaggggttcattaccaccgacatggatcaaaaccagattacggcgtttcacagcggcgcaatgatgcgttcgtacgaaaatcacgttcgtgatgtgccgggtgttaccttgggcctcgtaggtcctgatggccgcgagggcatgatccaaaatgccgaagaatttgctgctatgggcattccgttcatttttgacccaggtcaggcagtgcctctgttcagcggcccggaactgcgcgaatttatcgaacaggcggactatgtggtggtcaacgattacgaaagccgccttcttcaagcccgtactggctggaacgagcaggacattgttagccgcgtgcaggcgtatatcaccacgcaaggttcggctggagcccaagtaatgacaccggagaagcgctttgttattccggctgctaaagcttctcgtgtcgttgatccaactggttgcggcgacgcgtttcgcgccggcctgatctatggtattcagcatgaatatgattggttgaccattggccgcatgggaaacttaatgggtgcgctgaaagtggaacaccctggcggccaaaatcagcgtttcacctttgccgaattcaacgaccggttcaaacaatattttggctacgcgctc

SEQ ID NO: 2122 - protein, 321 aa, synthetic construct
  REGION 1..321: note = variant of adenosine kinase from Xanthemonas campestris
MHHHHHHGGSGMSALICGSLAYDNIMGFPDYFKNHILPDRVHRLNVSFLVFDMRREFGGCAGNIAYNLHLLGGRPIVMATVGQDFGPYREHFETLGIDLSRVKIIDDLSTPQGFITTDMDQNQITAFHSGAMMRSYENHVRDVPGVTLGLVGPDGREGMIQNAEEFAAMGIPFIFDPGQAVPLFSGPELREFIEQADYVVVNDYESRLLQARTGWNEQDIVSRVQAYITTQGSAGAQVMTPEKRFVIPAAKASRVVDPTGCGDAFRAGLIYGIQHEYDWLTIGRMGNLMGALKVEHPGGQNQRFTFAEFNDRFKQYFGYAL

SEQ ID NO: 2123 - DNA, 963 bp, synthetic construct
  misc_feature 1..963: note = variant of adenosine kinase from Xanthemonas campestris
  source 1..963: mol_type = other DNA
atgcatcatcaccatcaccatggggggtccggtatgagtgcactcatttgcggttctttagcgtatgataacatcatgtggtttccggattatttcgcgaaccatattctgcccgatcgtgttcaccgcctcaatgtcagctttctggtatttgacatgcgtcgtgaatttggaggctgtgccggcaacattgcgtacaatctgcatctgttgggtggtcgcccgatcgtaatggctacggtgggccaagatttcggtccgtatcgcgaacacttcgaaactctgggcattgacttatcccgcgtcaagatcatcgatgatctgagtacaccgcaggggttcattaccaccgacatggatcaaaaccagattacgctgtttcacagcggcgcaatgatgcgttcgtacgaaaatcacgttcgtgatgtgccgggtgttaccttgggcctcgtaggtcctgatggccgcgagggcatgatccaaaatgccgaagaatttgctgctatgggcattccgttcatttttgacccaggtcaggcagtgcctctgttcagcggcccggaactgcgcgaatttatcgaacaggcggactatgtggtggtcaacgattacgaaagccgccttcttcaagcccgtactggctggaacgagcaggacattgttagccgcgtgcaggcgtatatcaccacgcaaggttcggctggagccgtggtaatgacaccggagaagcgctacgttattccggctgctaaagcttctcgtgtcgttgatccaactggttgcggcgacgcgtttcgcgccggcctgatctatggtattcagcatgaatatgattggttgaccattggccgcatgggaaacttaatgggtgcgctgaaagtggaacaccctggcggccaaaatcagcgtttcacctttgccgaattcaacgaccggttcaaacaatattttggctacgcgctc

SEQ ID NO: 2124 - protein, 321 aa, synthetic construct
  REGION 1..321: note = variant of adenosine kinase from Xanthemonas campestris
MHHHHHHGGSGMSALICGSLAYDNIMWFPDYFANHILPDRVHRLNVSFLVFDMRREFGGCAGNIAYNLHLLGGRPIVMATVGQDFGPYREHFETLGIDLSRVKIIDDLSTPQGFITTDMDQNQITLFHSGAMMRSYENHVRDVPGVTLGLVGPDGREGMIQNAEEFAAMGIPFIFDPGQAVPLFSGPELREFIEQADYVVVNDYESRLLQARTGWNEQDIVSRVQAYITTQGSAGAVVMTPEKRYVIPAAKASRVVDPTGCGDAFRAGLIYGIQHEYDWLTIGRMGNLMGALKVEHPGGQNQRFTFAEFNDRFKQYFGYAL

SEQ ID NO: 2125 - DNA, 693 bp, synthetic construct
  misc_feature 1..693: note = variant of adenylate kinase from Thermotoga neapolitana
  source 1..693: mol_type = other DNA
atgcaccatcatcaccatcacgggggctccggcatgggggcatatctggtgttattaggtccgccgggcgcgggaaaaggtacccaaggccgtattatttcggcaaagactggcatcccgcatattagcacgggcgatatcctgcgtcagatcgtcgctaagcaaaacgatgaagttgcctcgagcattaaagagtggatgctgaaaggtgaactcgttccagatgaaattggtaatcctgtagtaaaacgccgcctgaaggagaaagactgcgaaaaaggctttattttggatggtttcccgcgtaccgtgcgccaagcggaatatctggatagttttcttgaaagccagggccgccagttgacagccgccgtgctgattgaggtccccgaagatgaagttgttgcacgtctgctgtctcgccgtgtttgtccgaaatgcgggcgtagttacaacatgatttttctgccaccaaaagaagacgagctgtgtgacgattgcggtgtcagcttagtacagcgtttagatgataaggaagaaacggtccgtatgcgcctgaaagtctaccgtgagaagacccagccggtcattgactattatagtaagaaaggtattctcgcacgcgtagatgggagccaagaaatcatgcctatcgtggcagaagtcctggggattctgggttggagcgataag

SEQ ID NO: 2126 - protein, 231 aa, synthetic construct
  REGION 1..231: note = variant of adenylate kinase from Thermotoga neapolitana
MHHHHHHGGSGMGAYLVLLGPPGAGKGTQGRIISAKTGIPHISTGDILRQIVAKQNDEVASSIKEWMLKGELVPDEIGNPVVKRRLKEKDCEKGFILDGFPRTVRQAEYLDSFLESQGRQLTAAVLIEVPEDEVVARLLSRRVCPKCGRSYNMIFLPPKEDELCDDCGVSLVQRLDDKEETVRMRLKVYREKTQPVIDYYSKKGILARVDGSQEIMPIVAEVLGILGWSDK

SEQ ID NO: 2127 - DNA, 693 bp, synthetic construct
  misc_feature 1..693: note = variant of adenylate kinase from Thermotoga neapolitana
  source 1..693: mol_type = other DNA
atgcaccatcatcaccatcacgggggctccggcatgggggcatatctggtgttattaggtccgccgggcgcgggaaaaggtacccaaggccgtattatttcggcaaagactggcatcccgcatattagcacgggcgatatcctgcgtcagatcgtcgctaagcaaaacgatgaagttgcctcgagcattaaagaatggatgctgaaaggtgaactcgttccagatgaaattggtaatcctgtagtaaaacgccgcctgaaggagaaagactgcgaaaaaggctttattttggatggtttcccgcgtaccgcccgtcaagcggaatatctggatagttttcttgaatcgcagggccgccagttgacagccgccgtgctgctggaggtccccgaagatgaagttgttgtgcgtctgctgtctcgccgtgtttgtccgaaatgcgggcgtagttacaacatgatttttctgccaccaaaagaagacgagctgtgtgacgattgcggtgtcagtttagtacagcgtttcgatgataaggaagaaacggtccgtatgcgcctgaaagtctaccgtgagaagacccagccggtcattgactattatagtaagaaaggtattctcgcacgcgtagatgggagccaagaaatcatgcctatcgtggcagaagtcctggggattctgggttggagcgataag

SEQ ID NO: 2128 - protein, 231 aa, synthetic construct
  REGION 1..231: note = variant of adenylate kinase from Thermotoga neapolitana
MHHHHHHGGSGMGAYLVLLGPPGAGKGTQGRIISAKTGIPHISTGDILRQIVAKQNDEVASSIKEWMLKGELVPDEIGNPVVKRRLKEKDCEKGFILDGFPRTARQAEYLDSFLESQGRQLTAAVLLEVPEDEVVVRLLSRRVCPKCGRSYNMIFLPPKEDELCDDCGVSLVQRFDDKEETVRMRLKVYREKTQPVIDYYSKKGILARVDGSQEIMPIVAEVLGILGWSDK

SEQ ID NO: 2129 - DNA, 693 bp, synthetic construct
  misc_feature 1..693: note = variant of adenylate kinase from Thermotoga neapolitana
  source 1..693: mol_type = other DNA
atgcaccatcatcaccatcacgggggctccggcatgggggcatatctggtgttattaggtccgccgggcgcgggaaaaggtacccaaggccgtattatttcggcaaagactggcatcccgcatattagcacgggcgatatcctgcgtcagatcgtcgctaagcaaaacgatgaagttgcctcgagcattaaagaatggatgctgaaaggtgaactcgttccagatgaaattggtaatcctgtagtaaaacgccgcctgaaggagaaagattgcgaaaaaggctttattttggatggtttcccgcgtaccgcgcgtcaagcggaatatctggatagttttcttgaatcgcagggccgccagttgacagccgccgtgctgctggaggtccccgaagatgaagttgttgtgcgtctgctgtctcgccgtgtttgtccgaaatgcgggcgtagttttaacatgatttttctggtgccaaaagaagacgagctgtgtgacgattgcggtgtcagtttagtacagcgtttcgatgataaggaagaaacggtccgtatgcgcctgaaagtctaccgtgagaagacccagccggtcattgactattatagtaagaaaggtattctcgcacgcgtagatgggagccaagaaatcatgcctatcgtggcagaagtcctggggattctgggttggagcgataag

SEQ ID NO: 2130 - protein, 231 aa, synthetic construct
  REGION 1..231: note = variant of adenylate kinase from Thermotoga neapolitana
MHHHHHHGGSGMGAYLVLLGPPGAGKGTQGRIISAKTGIPHISTGDILRQIVAKQNDEVASSIKEWMLKGELVPDEIGNPVVKRRLKEKDCEKGFILDGFPRTARQAEYLDSFLESQGRQLTAAVLLEVPEDEVVVRLLSRRVCPKCGRSFNMIFLVPKEDELCDDCGVSLVQRFDDKEETVRMRLKVYREKTQPVIDYYSKKGILARVDGSQEIMPIVAEVLGILGWSDK

SEQ ID NO: 2131 - DNA, 693 bp, synthetic construct
  misc_feature 1..693: note = variant of adenylate kinase from Thermotoga neapolitana
  source 1..693: mol_type = other DNA
atgcaccatcatcaccatcacgggggctccggcatgggggcatatctggtgttattaggtccgccgggcgcgggaaaaggtacccaaggccgtattatttcggcaaagactggcatcccgcatattagcacgggcgatatcctgcgtcagatcgtcgctaagcaaaacgatgaagttgcgtcgagcattaaagaatggatgctgaaaggtgaactcgttccagatgaaattggtaatcctgtagtactgcgccgcctgaaggagaaagattgcgaaaaaggctttattttggatggtttcccgcgtaccgcgcgtcaagcggaatatctggatagttttcttgaatcgcagggccgccagttgacagccgccgtgctgctggaggtccccgaagatgaagttgttgtgcgtctgctgtctcgccgtgtttgtccgaaatgcgggcgtagttttaacatgatttttctggtgccaaaagaagacgagctgtgtgacgattgcggtgtcagtttagtacagcgtttcgatgataaggaagaaacggtccgtatgcgcctgaaagtctaccaggagaagacccagccggtcattgactattatgcgaagaaaggtattctcgcacgcgtagatgggagccaagaaatcgaacctatcgtggcagaagtcctggggattctgggttggagcgataag

SEQ ID NO: 2132 - protein, 231 aa, synthetic construct
  REGION 1..231: note = variant of adenylate kinase from Thermotoga neapolitana
MHHHHHHGGSGMGAYLVLLGPPGAGKGTQGRIISAKTGIPHISTGDILRQIVAKQNDEVASSIKEWMLKGELVPDEIGNPVVLRRLKEKDCEKGFILDGFPRTARQAEYLDSFLESQGRQLTAAVLLEVPEDEVVVRLLSRRVCPKCGRSFNMIFLVPKEDELCDDCGVSLVQRFDDKEETVRMRLKVYQEKTQPVIDYYAKKGILARVDGSQEIEPIVAEVLGILGWSDK

SEQ ID NO: 2133 - DNA, 1251 bp, synthetic construct
  misc_feature 1..1251: note = variant of acetate kinase from Marinitoga sp. 38H-ov
  source 1..1251: mol_type = other DNA
atgcaccatcatcatcatcatggcggtagcggcatgaaagttctggtgattaattctggtagctcctccatcaaatatcagctcctcgatatgaccaacgaaaaggtattagcgaaaggcttggtcgagcgcattggcatcgacggttcgcgtatcgtgcataaagttaacggcgaagggcacgtgctggaacatgagattaaaaatcacgaaattggacttaaattggtcctggatcttcttacggacgaaaaatacggtgtgttgaaggatctcaaagaaatcgatgcagttgggcatcgcgtagtacatggcggcgagcgttttgccagtagcgtgaagattactgacgaagtcttaaagaccatcgagacgttgtcgttcttagctccgttacacaatccagcgaacattatgggtatcaagagcagcatgaaagtgttaccgggtgtgcctcaagttgccgtctttgatacagcgttccaccagaagatgccggagaaagcctatttgtacgcaatcccctatgagtactacgagaaatataaaattcgccgctatgggtttcatggaacctcacatcgttatgtgagtaaacgtgctgcggaaattatgggcaaaccgtacgatcagctcaagatcattaccgttcacgtgggtaacggcgcatcagttgcggcggtgaagaatggcgtatctgttgacacttccatgggtttcacaccacttgaaggtcttgtcatgggcacgcgcagcggcgatattgatccggccatcgtggaatttcttgagaaagaagaaggattgtcggccaaagaagtcgtcaacatcctcaacaagaaatctggtgtgtatgggctcaccaaaggctttagtagtgacatgcgtgacattgtgctgaaggctattgaaggtgatcctgtagcgcgccttgcattagatgtgtattattatcgtatcgcgaaatatattggcgcatacgctgcggccatgaacggtgttgacgcgatcgtctttaccgcaggagttggcgaaaatagcccgattatgcgcgaagaaattattgagaactacttgggctacttagggatcaagatcgataaagaagccaatgacttcaaaggtgaggagaagatcatttcaacgcccgattccaaagtgattgcgatggtagttccgaccaacgaggagctcatgatcgccaaagacacgaaagaaatcattgagaaagggttggacgagcttaagatc

SEQ ID NO: 2134 - protein, 417 aa, synthetic construct
  REGION 1..417: note = variant of acetate kinase from Marinitoga sp. 38H-ov
MHHHHHHGGSGMKVLVINSGSSSIKYQLLDMTNEKVLAKGLVERIGIDGSRIVHKVNGEGHVLEHEIKNHEIGLKLVLDLLTDEKYGVLKDLKEIDAVGHRVVHGGERFASSVKITDEVLKTIETLSFLAPLHNPANIMGIKSSMKVLPGVPQVAVFDTAFHQKMPEKAYLYAIPYEYYEKYKIRRYGFHGTSHRYVSKRAAEIMGKPYDQLKIITVHVGNGASVAAVKNGVSVDTSMGFTPLEGLVMGTRSGDIDPAIVEFLEKEEGLSAKEVVNILNKKSGVYGLTKGFSSDMRDIVLKAIEGDPVARLALDVYYYRIAKYIGAYAAAMNGVDAIVFTAGVGENSPIMREEIIENYLGYLGIKIDKEANDFKGEEKIISTPDSKVIAMVVPTNEELMIAKDTKEIIEKGLDELKI

SEQ ID NO: 2135 - DNA, 1812 bp, synthetic construct
  misc_feature 1..1812: note = variant of pyruvate oxidase from Jeotgalibaca sp. PTS2502
  source 1..1812: mol_type = other DNA
atgcaccatcatcatcatcatggcggtagcggcatgaccgatggcaagacgaaagttagcactgcgatgctgaaagtattagctggttgggacgtggataccatttatggaatcccgtctggtacactggcaccattgatggaagcccttggcgagcaggaagaaaccgacatcaaatttctgcaagtcaaacatgaggaagttggtgcgatggccgcagtaatgcagtggaaatacaagggcaaactcggagtttgcgtgggttcaggcggtccgggcgctactcacttagcgaacggcctgtatgatgccgccatggataatacccctgtcctggcaattctgggaagtcgcccgcagcgtgaactgaacatggatgccttccaagagttgaatcagaaccccatgtttgcgaatattgcggtgtacaaccgccgcgtggcctatgcagaacagaccccgaaactcgtcgacgaagctatccgtacggccatttcgaaacgtggtgttgcggtgctggaagttccaggcgatttcggctttcatgagatcgcaaatgacgctttctatagcagcggtcactcctacaaagattatgttagttcggcgattaacgaagccgatatcgacgctgcggtcgaagtgctgaacaacagcgatcgcaccgtaatttacgcaggcatcggtacaatgggccatggtccggcggttcaagaactttctcgcaagattaaagcgcctatcattaccacgggcaagaattttgagacctttgaatgggacttcgaggccctgactggttcaacgtatcgtgtgggttggaaaccggcaaatgaagccgtcaaagaagctgataccgtgttgtttgttggcagcaacttcccgtttgcggagattgaaggtaccttctcaaatatcaagaaatttattcagatcgataacaatccccgcatgttaggaaaacgccacaatcctgacgtagcgattttaggcgatgccggtgaagcggtgcatagtctccttgagaaagtcactccagtggaagaatctgcctggtggaacgcgaacgtcaagaatgttcagaactggcgtgactacatgaacaaattggagcagaaagaaagcggcgatctgcaactgtatcaggtgtacaatgccatcaacaaatatgcagatgaagacgctatttattcgacggatgtaggcaattccacccaaaccagcattcgccatcttcacatgacgccgaagaatatgtggcgtacctcgccgttatttgcgacgatgggtatcgccttacctggcggcattgcagcgaagaacgtttacccagatcgccaggcttggaacttgatgggtgatggagcgttcaatatggtgtatccggacgtcgtaactaacgtgtggtacaatatgccggttatcaacgtggtgtttaccaacacagagtacggtttcattaagaacaaatatgaagataccaataagaacacgtttggcaccgaattcccggacgtcgattatgcaatgatcgctcaagcacagggcgctgtgggatttacggtctcacgcattgaagacatcgatcaggtaatggccgatgcggtgaaagcgtacaaagagggtaaaaccgtggttattgacgccaagatcaccaaagatcgtcccattccggtagaaacactcaaattagacccgcgcctttatagtgccgaagagatcaaagcgtacaaagagaaatatgaagctgaagaactcgttccattctccgagttcttgaaagcagaaggccttacgagcaaagtgtctaag

SEQ ID NO: 2136 - protein, 604 aa, synthetic construct
  REGION 1..604: note = variant of pyruvate oxidase from Jeotgalibaca sp. PTS2502
MHHHHHHGGSGMTDGKTKVSTAMLKVLAGWDVDTIYGIPSGTLAPLMEALGEQEETDIKFLQVKHEEVGAMAAVMQWKYKGKLGVCVGSGGPGATHLANGLYDAAMDNTPVLAILGSRPQRELNMDAFQELNQNPMFANIAVYNRRVAYAEQTPKLVDEAIRTAISKRGVAVLEVPGDFGFHEIANDAFYSSGHSYKDYVSSAINEADIDAAVEVLNNSDRTVIYAGIGTMGHGPAVQELSRKIKAPIITTGKNFETFEWDFEALTGSTYRVGWKPANEAVKEADTVLFVGSNFPFAEIEGTFSNIKKFIQIDNNPRMLGKRHNPDVAILGDAGEAVHSLLEKVTPVEESAWWNANVKNVQNWRDYMNKLEQKESGDLQLYQVYNAINKYADEDAIYSTDVGNSTQTSIRHLHMTPKNMWRTSPLFATMGIALPGGIAAKNVYPDRQAWNLMGDGAFNMVYPDVVTNVWYNMPVINVVFTNTEYGFIKNKYEDTNKNTFGTEFPDVDYAMIAQAQGAVGFTVSRIEDIDQVMADAVKAYKEGKTVVIDAKITKDRPIPVETLKLDPRLYSAEEIKAYKEKYEAEELVPFSEFLKAEGLTSKVSK

SEQ ID NO: 2137 - DNA, 1812 bp, synthetic construct
  misc_feature 1..1812: note = variant of pyruvate oxidase from Jeotgalibaca sp. PTS2502
  source 1..1812: mol_type = other DNA
atgcaccatcatcatcatcatggcggtagcggcatgaccgatggcaagacgaaagttagcactgcgatgctgaaagtattagctggttgggacgtggataccatttatggaatcccgtctggtacactggcaccattgatggaagcccttggcgagcaggaagaaaccgacatcaaatttctgcaagtcaaacatgaggaagttggtgcgatggccgcagtaatgcagtggaaatacaagggcaaactcggagtttgcgtgggttcaggcggtccgggcgctactcacttagcgaacggcctgtatgatgccgccatggataatacccctgtcctggcaattctgggatcgcgcccgcagcgtgaactgaacatggatgccttccaagagttgaatcaggtccccatgtttgcgaacattgcggtgtacaaccgccgcgtggcctatgcagaacagaccccgaaactcgtcgacgaagctatccgtacggccatttcgaaacgtggtgttgcggtgctggaagttccaggcgatttcggctttcatgagatcgcaaatgacgctttctatagcagcggtcactcctacaaagattatgttagttcggcgattaacgaagccgatatcgacgctgcggtcgaagtgctgaacaacagcgatcgcaccgtaatttacgcaggcatcggtacaatgggccatggtccggcggttcaagaactttctcgcaagattaaagcgcctatcattaccacgggcaagaattttgagacctttgaatgggacttcgaggccctgactggttcaacgtatcgtgtgggttggaaaccggcaaatgaagccgtcaaagaagctgataccgtgttgtttgttggcagcaacttcccgtttgcggagattgaaggtaccttctcaaatatcaagaaatttattcagatcgataacaatccccgcatgttaggaaaacgccacaatcctgacgtagcgattttagccgatgccggtgaagcggtgcatagtctccttgagaaagtcactccagtggaagaatctgcctggtggaacgcgaacgtcaagaatgttcagaactggcgtgactacatgaacaaattggagcagaaagaaagcggcgatctgcaactgtatcaggtgtacaatgccatcaacaaatatgcagatgaagacgctatttattcgacggatgtaggcaattccacccaaaccagcattcgccatcttcacatgacgccgaagaatatgtggcgtacctcgccgttatttgcgacgatgggtatcgccttacctggcggcattgcagcgaagaacgtttacccagatcgccaggcttggaacttgatgggtgatggagcgttcaatatggtgtatccggacgtcgtaactaacgtgtggtacaatatgccggttatcaacgtggtgtttaccaacacagagtacggtttcattaagaacaaatatgaagataccaataagaacacgtttggcaccgaattcccggacgtcgattatgcaatgatcgctcaagcacagggcgctgtgggatttacggtctcacgcattgaagacatcgatcaggtaatggccgatgcggtgaaagcgtacaaagagggtaaaaccgtggttattgacgccaagatcaccaaagatcgtcccattccggtagaaacactcaaattagacccgcgcctttatagtgccgaagagatcaaagcgtacaaagagaaatatgaagctgaagaactcgttccattctccgagttcttgaaagcagaaggccttacgagcaaagtgtctaag

SEQ ID NO: 2138 - protein, 604 aa, synthetic construct
  REGION 1..604: note = variant of pyruvate oxidase from Jeotgalibaca sp. PTS2502
MHHHHHHGGSGMTDGKTKVSTAMLKVLAGWDVDTIYGIPSGTLAPLMEALGEQEETDIKFLQVKHEEVGAMAAVMQWKYKGKLGVCVGSGGPGATHLANGLYDAAMDNTPVLAILGSRPQRELNMDAFQELNQVPMFANIAVYNRRVAYAEQTPKLVDEAIRTAISKRGVAVLEVPGDFGFHEIANDAFYSSGHSYKDYVSSAINEADIDAAVEVLNNSDRTVIYAGIGTMGHGPAVQELSRKIKAPIITTGKNFETFEWDFEALTGSTYRVGWKPANEAVKEADTVLFVGSNFPFAEIEGTFSNIKKFIQIDNNPRMLGKRHNPDVAILADAGEAVHSLLEKVTPVEESAWWNANVKNVQNWRDYMNKLEQKESGDLQLYQVYNAINKYADEDAIYSTDVGNSTQTSIRHLHMTPKNMWRTSPLFATMGIALPGGIAAKNVYPDRQAWNLMGDGAFNMVYPDVVTNVWYNMPVINVVFTNTEYGFIKNKYEDTNKNTFGTEFPDVDYAMIAQAQGAVGFTVSRIEDIDQVMADAVKAYKEGKTVVIDAKITKDRPIPVETLKLDPRLYSAEEIKAYKEKYEAEELVPFSEFLKAEGLTSKVSK
